(19) United States
(12) Patent Application Publication
(10) Pub. No.: US 2006/0015972 A1
(43) Pub. Date: Jan. 19, 2006

(54) Plant transcriptional regulators of drought stress

(75) Inventors: Jacqueline E. Heard, Stonington, CT (US); Jose Luis Riechmann, Pasadena, CA (US); Robert A. Creelman, Castro Valley, CA (US); Oliver Ratcliffe, Oakland, CA (US); Roger D. Canales, San Francisco, CA (US); Peter P. Repetti, Emeryville, CA (US); Roderick W. Kumimoto, San Bruno, CA (US); Neal I. Gutterson, Oakland, CA (US); T. Lynne Reuber, San Mateo, CA (US); Omaira Pineda, Vero Beach, FL (US); Bradley K. Sherman, Berkeley, CA (US)

Correspondence Address: MENDEL BIOTECHNOLOGY C/O MOFO SF, 425 MARKET STREET, SAN FRANCISCO, CA, 94105, US

(73) Assignee: Mendel Biotechnology, Inc., Hayward, CA (US)

(21) Appl. No.: 10/714,887

(22) Filed: Nov. 13, 2003

Related U.S. Application Data
(63) Continuation-in-part of application No. 10/412,699, filed on Apr. 10, 2003.
Application No. 10/412,699 is a continuation-in-part of application No. 09/506,720, filed on Feb. 17, 2000, now abandoned.
Application No. 10/412,699 is a continuation-in-part of application No. 09/394,519, filed on Sep. 13, 1999, now abandoned.
Application No. 10/412,699 is a continuation-in-part of application No. 09/533,392, filed on Mar. 22, 2000, now abandoned.
Application No. 10/412,699 is a continuation-in-part of application No. 09/533,029, filed on Mar. 22, 2000, now Pat. No. 6,664,446.
Application No. 10/412,699 is a continuation-in-part of application No. 09/532,591, filed on Mar. 22, 2000, now abandoned.
Application No. 10/412,699 is a continuation-in-part of application No. 09/533,030, filed on Mar. 22, 2000, now abandoned.
Application No. 10/412,699 is a continuation-in-part of application No. 09/713,994, filed on Nov. 16, 2000.
(63) Continuation-in-part of application No. 10/456,882, filed on Jun. 6, 2003.
(63) Continuation-in-part of application No. 09/810,836, filed on Mar. 16, 2001, now Pat. No. 6,835,540.
(63) Continuation-in-part of application No. 10/421,138, filed on Apr. 23, 2003.
(63) Continuation-in-part of application No. 09/823,676, filed on Mar. 30, 2001, now Pat. No. 6,717,034.
(63) Continuation-in-part of application No. 09/996,140, filed on Nov. 26, 2001, now abandoned.
(63) Continuation-in-part of application No. 09/934,455, filed on Aug. 22, 2001, now abandoned.
(63) Continuation-in-part of application No. 10/112,887, filed on Mar. 18, 2002, now abandoned.
(63) Continuation-in-part of application No. 10/286,264, filed on Nov. 1, 2002.
(63) Continuation-in-part of application No. 10/225,066, filed on Aug. 9, 2002.
(63) Continuation-in-part of application No. 10/225,067, filed on Aug. 9, 2002.
(63) Continuation-in-part of application No. 10/225,068, filed on Aug. 9, 2002.
(63) Continuation-in-part of application No. 10/374,780, filed on Feb. 25, 2003.
Application No. 10/374,780 is a continuation-in-part of application No. 09/837,944, filed on Apr. 18, 2001, now abandoned.
Application No. 10/374,780 is a continuation-in-part of application No. 10/171,468, filed on Jun. 14, 2002, now abandoned.
(63) Continuation-in-part of application No. 10/666,642, filed on Sep. 18, 2003.
(60) Provisional application No. 60/135,134, filed on May 20, 1999.
(60) Provisional application No. 60/125,814, filed on Mar. 23, 1999.
(60) Provisional application No. 60/166,228, filed on Nov. 17, 1999.
(60) Provisional application No. 60/197,899, filed on Apr. 17, 2000.
(60) Provisional application No. 60/227,439, filed on Aug. 22, 2000.
(60) Provisional application No. 60/310,847, filed on Aug. 9, 2001.
(60) Provisional application No. 60/338,692, filed on Dec. 11, 2001.
(60) Provisional application No. 60/336,049, filed on Nov. 19, 2001.
(60) Provisional application No. 60/434,166, filed on Dec. 17, 2002.
(60) Provisional application No. 60/411,837, filed on Sep. 18, 2002.
(60) Provisional application No. 60/465,809, filed on Apr. 24, 2003.

(51) Int. Cl. A01H 1/00; C12Q 1/68; C12N 15/82; C12N 5/04; C07K 14/415

(52) U.S. Cl. 800/289; 435/6; 435/419; 435/468; 530/370

(57) ABSTRACT

The invention relates to plant transcription factor polypeptides, polynucleotides that encode them, homologs from a variety of plant species, and methods of using the polynucleotides and polypeptides to produce transgenic plants having improved abiotic stress tolerance, such as drought stress tolerance, as compared to wild-type or reference plants. Sequence information related to these polynucleotides and polypeptides can also be used in bioinformatic search methods to identify related sequences and is also disclosed.

### RELATIONSHIP TO COPENDING APPLICATIONS

[0001] This application claims priority from: (a) U.S. application Ser. No. 10/412,699, filed Apr. 10, 2003, which in turn claims priority from U.S. Non-provisional application Ser. No. 09/506,720, filed Feb. 17, 2000, which in turn claims priority from U.S. Provisional Application No. 60/135,134, filed May 20, 1999; U.S. Non-provisional application Ser. No. 09/394,519, filed Sep. 13, 1999; U.S. Non-provisional application Ser. No. 09/533,392, filed Mar. 22, 2000; U.S. Non-provisional application Ser. No. 09/533,029, filed Mar. 22, 2000; U.S. Non-provisional application Ser. No. 09/532,591, filed Mar. 22, 2000; U.S. Non-provisional application Ser. No. 09/533,030, filed Mar. 22, 2000, which in turn claims priority from U.S. Provisional Application No. 60/125,814, filed Mar. 23, 1999; U.S. Non-provisional application Ser. 09/713,994, filed Nov. 16, 2000, which in turn claims priority from U.S. Provisional Application No. 60/166,228, filed Nov. 17, 1999, U.S. Provisional Application No. 60/197,899, filed Apr. 17, 2000, and U.S. Provisional Application No. 60/227,439, filed Aug. 22, 2000; (b) U.S. Non-provisional application Ser. No. 10/456,882, filed Jun. 6, 2003; (c) U.S. patent application Ser. No. 09/810,836, filed Mar. 16, 2001; (d) U.S. Non-provisional application Ser. No. 10/421,138, filed Apr. 23, 2003; (e) U.S. Non-provisional application Ser. No. 09/823,676, filed Mar. 30, 2001; (f) U.S. Non-provisional application Ser. No. 09/996,140, filed Nov. 26, 2001; (g) U.S. Non-provisional application Ser. No. 09/934,455, filed Aug. 22, 2001; (h) U.S. Non-provisional application Ser. No. 10/112,887, filed Mar. 18, 2002; (i) U.S. Non-provisional application Ser. No. 10/286,264, filed Nov. 1, 2002; (.) U.S. Non-provisional application Ser. No. 10/225,066, filed Aug. 9, 2002; (k) U.S. Non-provisional application Ser. No. 10/225,067, filed Aug. 9, 2002; (1) U.S. Non-provisional application Ser. No. 10/225,068, filed Aug. 9, 2002; which claims priority from U.S. Provisional Application No. 60/310,847, filed Aug. 9, 2001, U.S. Provisional Application No. 60/338,692, filed Dec. 11, 2001, and from U.S. Provisional Application No.60/336,049, filed Nov. 19, 2001; (m) U.S. Non-provisional application Ser. No. 10/374,780, filed Feb. 25, 2003, which claims priority from U.S. Non-provisional application Ser. No. 09/837,944, filed Apr. 18, 2001, and U.S. Non-provisional application Ser. No. 10/171,468, filed Jun. 14, 2002; and (n) U.S. Non-provisional application Ser. No. 10/666,642, filed Sep. 18, 2003, which claims priority from U.S. Provisional Application No. 60/434,166, filed Dec. 17, 2002, U.S. Provisional Application No. 60/411,837, filed Sep. 18, 2002, and U.S. Provisional Application No. 60/465,809, filed Apr. 24, 2003. The entire contents of all of these applications are hereby incorporated by reference.

### FIELD OF THE INVENTION

[0002] The present invention relates to compositions and methods for modifying a plant phenotypically, said plant having increased tolerance to drought stress.

### BACKGROUND OF THE INVENTION

[0003] Control of Cellular Processes by Transcription Factors.

[0004] Phylogenetic relationships among organisms have been demonstrated many times, and studies from a diversity of prokaryotic and eukaryotic organisms suggest a more or less gradual evolution of biochemical and physiological mechanisms and metabolic pathways. Despite different evolutionary pressures, proteins that regulate the cell cycle in yeast, plant, nematode, fly, rat, and man have common chemical or structural features and modulate the same general cellular activity. Comparisons of Arabidopsis gene sequences with those from other organisms where the structure and/or function may be known allow researchers to draw analogies and to develop model systems for testing hypotheses. These model systems are of great importance in developing and testing plant varieties with novel traits that may have an impact upon agronomy. These traits, such as a plant's biochemical, developmental, or phenotypic characteristics, may be controlled through a number of cellular processes. One important way to manipulate that control is through transcription factors, proteins that influence the expression of a particular gene or sets of genes. Transformed and transgenic plants that comprise cells having altered levels of at least one selected transcription factor, for example, possess advantageous or desirable traits. Strategies for manipulating traits by altering a plant cell's transcription factor content can therefore result in plants and crops with new and/or improved commercially valuable properties. Transcription factors can modulate gene expression, either increasing or decreasing (inducing or repressing) the rate of transcription. This modulation results in differential levels of gene expression at various developmental stages, in different tissues and cell types, and in response to different exogenous (e.g., environmental) and endogenous stimuli throughout the life cycle of the organism.

[0005] Because transcription factors are key controlling elements of biological pathways, altering the expression levels of one or more transcription factors can change entire biological pathways in an organism. For example, manipulation of the levels of selected transcription factors may result in increased expression of economically useful proteins or biomolecules in plants or improvement in other agriculturally relevant characteristics. Conversely, blocked or reduced expression of a transcription factor may reduce biosynthesis of unwanted compounds or remove an undesirable trait. Therefore, manipulating transcription factor levels in a plant offers tremendous potential in agricultural biotechnology for modifying a plant's traits, including traits that improve a plant's survival and yield during periods of drought and other abiotic stresses, as noted below.

[0006] Problems Associated with Water Deprivation.

[0007] In the natural environment, plants often grow under unfavorable conditions, such as drought (low water availability), high salinity, chilling, freezing, high temperature, flooding, or strong light. Any of these abiotic stresses can delay growth and development, reduce productivity, and in extreme cases, cause the plant to die. In general, tolerance to abiotic stress is associated with a host of morphological and physiological traits; these include root structure, shoot architecture, variation in leaf cuticle thickness, stomatal regulation, osmotic adjustment, antioxidant capacity, hormonal regulation, desiccation tolerance (membrane and protein stability), maintenance of photosynthesis, and the timing of events during reproduction (Bohnert et al. (1995) Plant Cell 7: 1099-1111; Shinozaki and Yamaguchi-Shinozaki (1996) Curr. Opin. Biotechnol. 7: 161-167; Bray (1997) Trends Plant Sci. 2: 48-54; Nguyen et al. (1997) Crop Sci. 37: 1426-1434).

[0008] Of these stresses, low water availability, which in a severe form is referred to as a drought, is a major factor in crop yield reduction worldwide. A drought is a period of dry weather that persists long enough to produce a hydrologic imbalance, which can result, for example, in wilting, senescence, and general crop damage. Short periods of dry weather can lead to hydrologic imbalances of economic important, but while most weather changes are brief and short-lived, drought can be a more gradual phenomenon, slowly taking hold of an area and tightening its grip with time. In severe cases, drought can last for many years and can have devastating effects on agriculture and water supplies. For maize, loss to drought in the tropics alone is thought to exceed 20 million tons of grain per year. With burgeoning population and chronic shortage of available fresh water, drought is not only the number one weather related problem in agriculture, it also ranks as one of the major natural disasters, causing not only economic damage, but also loss of human lives. For example, losses from the US drought of 1988 exceeded $40 billion, exceeding the losses caused by Hurricane Andrew in 1992, the Mississippi River floods of 1993, and the San Francisco earthquake in 1989. In some areas of the world, the effects of drought can be far more severe. In severely affected regions (such as southern Africa in 1991-92), this can correspond to a loss of up to 60% of the potential yield (Edmeades et al. (1992) “47th Annual Corn & Sorghum Research Conference”; in D. Wilkinson, ed., Washington, D.C.: American Seed Trade Association—ASTA, pp. 93-111). In the Horn of Africa the 1984-1985 drought led to a famine that killed 750,000 people.

[0009] Problems for plants caused by low water availability include mechanical stresses caused by the withdrawal of cellular water. Drought also causes plants to become more susceptible to various diseases (Simpson (1981), ed., “The Value of Physiological Knowledge of Water Stress in Plants”, In Water Stress on Plants, Praeger, N.Y., pp. 235-265).

[0010] In addition to the many land regions of the world that are too arid for most if not all crop plants, overuse and over-utilization of available water is resulting in an increasing loss of agriculturally-usable land, a process which, in the extreme, results in desertification. The problem is further compounded by increasing salt accumulation in soils, which adds to the loss of available water in soils.

[0011] Water deficit is a common component of many plant stresses. Water deficit occurs in plant cells when the whole plant transpiration rate exceeds the water uptake. In addition to drought, other stresses, such as salinity and low temperature, produce cellular dehydration (McCue and Hanson (1990) Trends Biotechnol. 8: 358-362

[0012] Salt and drought stress signal transduction include ionic and osmotic homeostasis signaling pathways. The ionic aspect of salt stress is signaled via the SOS pathway where a calcium-responsive SOS3-SOS2 protein kinase complex controls the expression and activity of ion transporters such as SOS1. The pathway regulating ion homeostasis in response to salt stress has been described recently by Xiong and Zhu (2002) Plant Cell Environ. 25: 131-139 and Ohta et al. (2003) Proc Natl Acad Sci USA 100: 11771-11776.

[0013] The osmotic component of salt stress involves complex plant reactions that overlap with drought and/or low temperature stress responses.

[0014] Common aspects of drought, cold and salt stress response have been reviewed recently by Xiong and Zhu (2002) supra). Those include:
[0015] (a) transient changes in the cytoplasmic calcium levels very early in the signaling event (Knight, (2000) Int. Rev. Cytol. 195: 269-324; Sanders et al. (1999) Plant Cell 11: 691-706);
[0016] (b) signal transduction via mitogen-activated and/or calcium dependent protein kinases (CDPKs; see Xiong et al., 2002) and protein phosphatases (Merlot et al. (2001) Plant J. 25: 295-303; Tähtiharju and Palva (2001) Plant J. 26: 461-470);
[0017] (c) increases in abscisic acid levels in response to stress triggering a subset of responses (Xiong et al. (2002) supra, and references therein);
[0018] (d) inositol phosphates as signal molecules (at least for a subset of the stress responsive transcriptional changes (Xiong et al. (2001) Genes Dev. 15: 1971-1984);
[0019] (e) activation of phospholipases which in turn generate a diverse array of second messenger molecules, some of which might regulate the activity of stress responsive kinases (phospholipase D functions in an ABA independent pathway, Frank et al. (2000) Plant Cell 12: 111-124);
[0020] (f) induction of late embryogenesis abundant (LEA) type genes including the CRT/DRE responsive CORIRD genes (Xiong and Zhu (2002) supra);
[0021] (g) increased levels of antioxidants and compatible osmolytes such as proline and soluble sugars (Hasegawa et al. (2000) Annu. Rev. Plant Mol. Plant Physiol. 51: 463-499); and
[0022] (h) accumulation of reactive oxygen species such as superoxide, hydrogen peroxide, and hydroxyl radicals (Hasegawa et al. (2000) supra).

[0023] Abscisic acid biosynthesis is regulated by osmotic stress at multiple points. Both ABA-dependent and -independent osmotic stress signaling first modify constitutively expressed transcription factors, leading to the expression of early response transcriptional activators, which then activate downstream transcriptional activators and stress tolerance effector genes.

[0024] Based on the commonality of many aspects of low-temperature, drought and salt stress responses, it can be concluded that genes that increase tolerance to low temperature or salt stress can also improve drought stress protection. In fact, this has already been demonstrated for transcription factors, as in the case of AtCBF/DREB1, and for other genes such as OsCDPK7 (Saijo et al. (2000) Plant J. 23: 319-327) or AVP1 (a vacuolar pyrophosphatase-proton-pump, Gaxiola et al. (2001) Proc. Natl. Acad. Sci. USA 98: 11444-11449).

[0025] The present invention relates to methods and compositions for producing transgenic plants with improved tolerance to drought and other abiotic stresses. This provides significant value in that the plants may thrive in hostile environments where low water availability limits or prevents growth of non-transgenic plants. We have identified polynucleotides encoding transcription factors, including G2133, G1274, G922, G2999, G3086, G354, G1792, G2053, G975, G1069, G916, G1820, G2701, G47, G2854, G2789, G634, G175, G2839, G1452, G3083, G489, G303, G2992, G682, functionally related sequences listed in the Sequence Listing, and structurally and functionally similar sequences, developed numerous transgenic plants using these polynucleotides, and analyzed the plants for their tolerance to drought stress. In so doing, we have identified important polynucleotide and polypeptide sequences for producing commercially valuable plants and crops as well as the methods for making them and using them. Other aspects and embodiments of the invention are described below and can be derived from the teachings of this disclosure as a whole.

### SUMMARY OF THE INVENTION

[0026] The present method is directed to recombinant polynucleotides that confer abiotic stress tolerance in plants when the expression of any of these recombinant polynucleotides is altered (e.g., by overexpression). Related sequences that are also encompassed by the invention include nucleotide sequences that hybridize to the complement of the sequences of the invention under stringent conditions. One example of a stringent condition that defines the invention, includes a hybridization procedure that incorporates two wash steps of 6×SSC and 65° C., each step being 10-30 minutes in duration. For example, G2133 (polynucleotide SEQ ID NO: 11 and polypeptide SEQ ID NO: 12) confer tolerance to a number of abiotic stresses, including drought, cold conditions during germination, cold conditions with respect to more mature plants (chilling), and low nitrogen conditions, when this polypeptide is overexpressed in plants. The invention thus includes the G2133 polynucleotide and polypeptide, as well as nucleotide sequences that are structurally similar in that they or their complement hybridize to SEQ ID NO: 11 under stringent hybridization conditions.

[0027] The invention also pertains to a transgenic plant that comprises a recombinant polynucleotide that encodes a polypeptide that regulates transcription. For example, a sizeable number of polypeptides that contain the AP2 domain have been shown to possess gene-regulating activity. In this aspect of the invention, the polypeptide has the property of a polypeptide of the Sequence Listing of regulating abiotic stress tolerance in a plant when the polypeptide is overexpressed in a plant. An example of a recombinant polynucleotide that is comprised by the transgenic plant is G2133, and in this case the polypeptide that is overexpressed is the G2133 polypeptide. In this aspect of the invention, the AP2 domain is sufficiently homologous to the AP2 domain of the G2133 polypeptide that the polypeptide binds to a transcription-regulating region. This binding confers increased abiotic stress tolerance in the transgenic plant when the plant is compared to a non-transformed plant that does not overexpress the polypeptide.

[0028] The invention also includes a transgenic plant that overexpresses a recombinant polynucleotide comprising a nucleotide sequence that hybridizes to the complement of any polynucleotide of the invention under stringent conditions. This transgenic plant has increased abiotic stress tolerance as compared to a non-transformed plant that does not overexpress a polypeptide encoded by the recombinant polynucleotide. One example of a polynucleotide of the invention that functions in this regard is the G2133 polynucleotide (SEQ ID NO 11).

[0029] The invention also encompasses a method for producing a transgenic plant having increased tolerance to abiotic stress. These method steps include first providing an expression vector that contains a nucleotide sequence that hybridizes to the complement of the a polynucleotide of the invention (e.g., the G2133 polynucleotide, SEQ ID NO 11) under stringent hybridization conditions. The expression vector is then introduced into a plant cell, the plant cell is cultured, from which a plant is generated. Due to the presence of the expression vector in the plant, the polypeptide encoded by the nucleotide sequence is overexpressed. This polypeptide has the property of regulating abiotic stress tolerance in a plant, compared to a non-transformed plant that does not overexpress the polypeptide. After the abiotic stress-tolerant transgenic plant is produced, it may be identified by comparing it with one or more non-transformed plants that do not overexpress the polypeptide. These method steps may further include selfing or crossing the abiotic stress-tolerant plant with itself or another plant, respectively, to produce seed; (“selfing” refers to self-pollinating, or using pollen from one plant to fertilize the same plant or another plant in the same line, whereas “crossing” generally refers to cross pollination with plant from a different line, such as a non-transformed or wild-type plant, or another transformed plant from a different transgenic line of plants). Crossing provides the advantage of being able to produce new varieties. The resulting seed may then be used to grow a progeny plant that is transgenic and has increased tolerance to abiotic stress.

[0030] The invention is also directed to a method for increasing a plant's tolerance to abiotic stress. This method includes first providing a vector that comprises (i) regulatory elements effective in controlling expression of a polynucleotide sequence in a target plant, where the regulatory elements flank the polynucleotide sequence; and (ii) the polynucleotide sequence itself, which encodes a polypeptide that has the ability to regulate abiotic stress tolerance in a plant, as compared to a non-transformed plant that does not overexpress the polypeptide. The plant is transformed with the vector in order to generate a transformed plant with increased tolerance to abiotic stress. An example of a polynucleotide sequence that may be used to transform the target plant includes G2133; in this case, the polypeptide that is overexpressed is the G2133 polypeptide.

### BRIEF DESCRIPTION OF THE SEQUENCE LISTING AND FIGURES

[0031] The file of this patent contains at least one drawing executed in color. Copies of this patent with color drawing(s) will be provided by the Patent and Trademark Office upon request and payment of the necessary fee.

[0032] The Sequence Listing provides exemplary polynucleotide and polypeptide sequences of the invention. The traits associated with the use of the sequences are included in the Examples.

[0033] CD-ROM1 is a read-only memory computer-readable compact disc and contains a copy of the Sequence Listing in ASCII text format. The Sequence Listing is named “MBI0058CIP.ST25.txt” and is 740 kilobytes in size. The copies of the Sequence Listing on the CD-ROM disc are hereby incorporated by reference in their entirety.

[0034] FIG. 1 shows a conservative estimate of phylogenetic relationships among the orders of flowering plants (modified from Angiosperm Phylogeny Group (1998) Ann. Missouri Bot. Gard. 84: 1-49). Those plants with a single cotyledon (monocots) are a monophyletic clade nested within at least two major lineages of dicots; the eudicots are further divided into rosids and asterids. Arabidopsis is a rosid eudicot classified within the order Brassicales; rice is a member of the monocot order Poales. FIG. 1 was adapted from Daly et al. (2001) Plant Physiol. 127: 1328-1333.

[0035] FIG. 2 shows a phylogenic dendogram depicting phylogenetic relationships of higher plant taxa, including clades containing tomato and Arabidopsis; adapted from Ku et al. (2000) Proc. Natl. Acad. Sci. 97: 9121-9126; and Chase et al. (1993) Ann. Missouri Bot. Gard. 80: 528-580.

[0036] FIGS. 3A-3M present a multiple amino acid sequence alignment of G47 and G47 orthologs and paralogs. Clade orthologs and paralogs are indicated by the black bar on the left side of the figure. Conserved regions of identity and similarity are boxed.

[0037] FIG. 4 illustrates the relationship of G47 and related sequences in this phylogenetic tree of the G47 clade and similar sequences. The tree building method used was “Neighbor Joining” with “Systematic Tie-Breaking” and Bootstrapping with 1000 replicates (Uncorrected (“p”), with gaps distributed proportionally). Full-length polypeptides were used to build the phylogeny as defined in FIG. 4. The members of the clade shown within the box are predicted to contain functional homologs of G47. Abbreviations: At Arabidopsis thaliana; Os (jap) Oryza sativa (japonica cultivar group); Zm Zea mays; Gm Glycine max; Mt Medicago truncatula; Br Brassica rapa; Bo Brassica oleracea; Ze: Zinnia elegans.

[0038] FIG. 5 Alignment of portion of AP2 domain for G47 clade. The three residues indicated by the arrows define the G47 clade. All clade members have a valine, valine and histidine residue at these positions, respectively.

[0039] FIG. 6A, which shows the results of an experiment conducted with G47-overexpressing lines, illustrates an example of an osmotic stress assay. The medium used in this root growth assay contained polyethylene glycol (PEG). After germination, the seedlings of a 35S::G47 overexpressing line (the eight seedlings on left labeled “OE.G47-22”) appeared larger and had more root growth than the four wild-type seedlings on the right. As would be predicted by the osmotic stress assay, G47 plants showed enhanced survival and drought tolerance in a soil-based drought assay, as did G2133, a paralog of G47 (see FIGS. 7A and 7B). FIG. 6B also demonstrates an interesting effect of G47 overexpression; the 35S::G47 plants on the left and in the center of this photograph had short, thick, fleshy inflorescences with reduced apical dominance compared with the wild-type plant on the right.

[0040] FIGS. 7A and 7B compare the recovery from a drought treatment of wild-type controls and two lines of Arabidopsis plants overexpressing G2133, a paralog of G47. FIG. 7A shows plants of 35S::G2133 line 5 (left) and control plants (right). FIG. 7B shows plants of 35S::G2133 line 3 (left) and control plants (right). Each pot contained several plants grown under 24 hours light. All were deprived of water for eight days, and are shown after re-watering. All of the plants of the G2133 overexpressor lines recovered, and all of the control plants were either dead or severely and adversely affected by the drought treatment.

[0041] FIGS. 8A-8S present a multiple amino acid sequence alignment of G2999 and G2999 orthologs and paralogs. Consensus residues that are identical between sequences appear in boldface, and similar residues appear within the boxes.

[0042] FIGS. 9A-9C compare a number of homeodomains from the zinc-finger-homeodomain-type (ZF-HD) proteins related to G2999. Homeodomains from the ZF-HD type proteins are distinct from classical types of homeodomains and lie on the distinct branch of the tree shown in FIG. 10. The relationships established from this type of alignment of homeodomains were used to generate the phylogenetic tree shown in FIG. 10.

[0043] FIG. 10A illustrates the relationship of G2999 and related sequences in this phylogenetic tree of the G2999 clade and similar sequences comprising ZF-HD-type proteins. The tree building method used was “Neighbor Joining” with “Systematic Tie-Breaking” and Bootstrapping with 1000 replicates (Uncorrected (“p”), with gaps distributed proportionally. All of the sequences shown are members of the clade and are predicted to be functional homologs of G2999. Abbreviations: At Arabidopsis thaliana; Os (jap) Oryza sativa (japonica cultivar group); Os (ind) Oryza sativa (indica cultivar group); Zm Zea mays; Lj Lotus corniculatus var. japonicus; Bn Brassica napus; Fb Flaveria bidentis.

[0044] FIG. 10B is a phylogenetic tree (neighbor-joining, 1000 bootstraps) highlighting the relational differences between the ZF-HD type proteins and the “classical” homeodomain (HD) proteins. The homeodomains from ZF-HD type proteins lie on a distinct branch of the tree compared to classical types of homeodomains (arrow).

[0045] FIG. 11A illustrates the results of root growth assays with G2999-overexpressing seedlings and controls in a high sodium chloride medium. The eight 35S::G2999 Arabidopsis seedlings on the left were larger, greener, and had more root growth than the four control seedlings on the right. Another member of the G2999 clade, G2998, also showed a salt tolerance phenotype and performed similarly in the plate-based salt stress assay seen FIG. 11B. In the latter assay 35S::G2998 seedlings appeared large and green, whereas wild-type seedlings in the control assay plate shown in FIG. 11C were small and had not yet expanded their cotyledons. As is noted below, high sodium chloride growth assays often are used to indicate osmotic stress tolerance such as drought tolerance, which was subsequently confirmed with soil-based assays conducted with G2999-overexpressing plants.

[0046] FIGS. 12A-12L represent a multiple amino acid sequence alignment of G1792 orthologs and paralogs. Clade orthologs and paralogs are indicated by the black bar on the left side of the figure. Conserved regions of identity are boxed and bolded while conserved sequences of similarity are boxed with no bolding. The AP2 conserved domains span alignment coordinates 196-254. The S conserved domain spans alignment coordinates of 301-304. The EDLL conserved domain spans the alignment coordinates of 391-406 (see FIG. 13). Abbreviations: At Arabidopsis thaliana; Os Oryza sativa; Zm Zea mays; Ta Triticum aestivum; Gm Glycine max; Mt Medicago truncatula.

[0047] FIG. 13 shows a novel conserved domain for the G1792 clade, herein referred to as the “EDLL domain”. All clade members contain a glutamic acid residue at position 3, an aspartic acid residue at position 8, and a leucine residue at positions 12 and 16.

[0048] FIG. 14 illustrates the relationship of G1792 and related sequences in this phylogenetic tree of the G1792 clade. The tree building method used was “Neighbor Joining” with “Systematic Tie-Breaking” and Bootstrapping with 1000 replicates. Only conserved domains were used to build the phylogeny as defined in FIG. 12. The members of the clade are shown within the box.

[0049] FIGS. 15A and 15B compare soil-based drought assays for G1792 overexpressors and wild-type control plants. 35S::G1792 lines had a much healthier appearance after a period of water deprivation (FIG. 15A) than control plants (FIG. 15B).

[0050] FIG. 16A-16U show a multiple amino acid sequence alignment of G3086 and its orthologs and paralogs. The G3086 clade is indicated by the black bar on the left side of the figure.

[0051] FIG. 17 is a phylogenetic tree of the G3086 lade, including G3086 and its paralogs and orthologs. Full length, predicted protein sequences were used to construct a pairwise comparison, bootstrapped (1000 replicates) neighbor-joining tree, consensus view. Sequences within the G3086 clade are located within the box. Abbreviations: At Arabidopsis thaliana; Os Oryza sativa; Zm Zea mays; Gm Glycine max; Pt Pinus taeda.

[0052] FIG. 18A shows the effects of a heat assay on Arabidopsis wild-type and G3086-overexpressing plants. Generally, the overexpressors on the left were larger, paler, and bolted earlier than the wild type plants seen on the right in this plate. The same G3086 overexpressing lines, as exemplified by the eight seedlings on the left of FIG. 18B, were also found to be larger, greener, and had more root growth in a high salt root growth assay than control plants, including the four on the right in FIG. 18B.

[0053] FIGS. 19A-19R show a multiple amino acid sequence alignment of G922 orthologs and paralogs. Clade orthologs and paralogs are indicated by black bar on the left side of the figure. Residues that appear in boldface represent an acidic, ser/pro-rich domain that is unique to the G922 clade. Abbreviations: At Arabidopsis thaliana; Os Oryza sativa; Zm Zea mays; Ta Triticum aestivum; Gm Glycine max; Le Lycopersicon esculentum; Ps Pisum sativum.

[0054] FIG. 20 is a phylogenetic tree of the G922 paralogs and orthologs. Full length, predicted protein sequences were used to construct a pairwise comparison, bootstrapped (1000 replicates) neighbor-joining tree, consensus view. Sequences within the G922 clade are located within the box.

[0055] As seen in FIG. 21A, which shows a root growth assay on media containing high concentrations (150 mM) of salt, G922 overexpressors exhibited greener seedlings with longer roots than wild-type seedlings seen in FIG. 21B. FIG. 21C shows seedlings of several G922 overexpressing lines on media containing a high sucrose concentration (9.4%). A number of these seedlings have greener cotyledons and longer roots than the wild-type seedlings on the same media in FIG. 21D.

[0056] FIGS. 22A-22R show a multiple sequence alignment of predicted protein sequences from G1274 paralogs and orthologs. The sequences within the G1274 clade are indicated by the black bar on the margin. Amino acid identities and similarities are outlined and shown in bold.

[0057] FIG. 23 represents a phylogenetic tree for the G1274 paralogs and orthologs. Full length, predicted protein sequences were used to construct a bootstrapped (1000 replicates) neighbor-joining tree. Gaps and missing data were handled using pairwise deletion and the distance method used was p-distance. Sequences within the G1274 clade appear within the box.

[0058] FIG. 24 depicts a multiple sequence alignment of a portion of the conserved WRKY domain from G1274 paralogs and potential orthologs. The sequences within the G1274 clade are indicated by the black bar in the margin. Conserved identities and similarities are outlined and bolded. Amino acid residues within this domain that distinguish the G1274 clade sequences, and are putatively responsible for conserved functionality, are indicated with an asterisk.

[0059] FIG. 25A is a photograph of Arabidopsis 35S::G1274 seedlings grown on low nitrogen media supplemented with sucrose plus glutamine. Seedlings of two overexpressing lines are present on this plate (not distinguished), and both lines contained less anthocyanin than the wild-type seedlings seen in FIG. 25B. The lack of anthocyanin production indicated that these lines were less stressed than control seedlings under the same conditions. G1274 overexpressors in FIG. 25C and wild-type in FIG. 25D were also compared in a cold germination assay, in which the overexpressors were found to be generally larger and greener than the controls.

[0060] FIGS. 26A-26D compare soil-based drought assays for G1274 overexpressors and wild-type control plants, which confirms the results predicted after the performance of G1274 overexpressors in plate-based osmotic stress assays. 35S::G1274 lines fared much better after a period of water deprivation (FIG. 26A) than control plants (FIG. 26B). This distinction was particularly evident in the overexpressor plants when the drought period was followed by rewatering; the overexpressor plants recovered to a healthy and vigorous state (FIG. 26C). Conversely, none of the wild-type plants recovered after rewatering (FIG. 26D).

[0061] FIGS. 27A-27BB show a multiple sequence alignment of predicted protein sequences from G2053, and its paralogs and orthologs. The sequences within the G2053 clade are indicated by the black bar to the left of the alignment. The amino acid residues in boldface are consensus residues, and those within the boxes represent conserved, similar residues.

[0062] FIG. 28 is a phylogenetic tree for the G2053 paralogs and orthologs. Full length, predicted protein sequences were used to construct a bootstrapped (1000 replicates) neighbor-joining tree. Gaps and missing data were handled using pairwise deletion and the distance method used was p-distance. Sequences within the G2053 clade appear within the box.

[0063] FIG. 29 shows the results of a G2053-overexpressor root growth assay on media containing high concentrations of PEG. The eight G2053 overexpressor seedlings to the left of the plate showed more root growth, and were generally larger, than the four wild-type controls on the right.

### DESCRIPTION OF THE INVENTION

[0064] In an important aspect, the present invention relates to polynucleotides and polypeptides, for example, for modifying phenotypes of plants, particularly those associated with drought stress tolerance. Throughout this disclosure, various information sources are referred to and/or are specifically incorporated. The information sources include scientific journal articles, patent documents, textbooks, and World Wide Web browser-inactive page addresses, for example. While the reference to these information sources clearly indicates that they can be used by one of skill in the art, each and every one of the information sources cited herein are specifically incorporated in their entirety, whether or not a specific mention of “incorporation by reference” is noted. The contents and teachings of each and every one of the information sources can be relied on and used to make and use embodiments of the invention.

[0065] As used herein and in the appended claims, the singular forms “a,” “an,” and “the” include plural reference unless the context clearly dictates otherwise. Thus, for example, a reference to “a plant” includes a plurality of such plants, and a reference to “a stress” is a reference to one or more stresses and equivalents thereof known to those skilled in the art, and so forth.

Definitions

[0066] “Nucleic acid molecule” refers to a oligonucleotide, polynucleotide or any fragment thereof. It may be DNA or RNA of genomic or synthetic origin, double-stranded or single-stranded, and combined with carbohydrate, lipids, protein, or other materials to perform a particular activity such as transformation or form a useful composition such as a peptide nucleic acid (PNA).

[0067] “Polynucleotide” is a nucleic acid molecule comprising a plurality of polymerized nucleotides, e.g., at least about 15 consecutive polymerized nucleotides, optionally at least about 30 consecutive nucleotides, at least about 50 consecutive nucleotides. A polynucleotide may be a nucleic acid, oligonucleotide, nucleotide, or any fragment thereof. In many instances, a polynucleotide comprises a nucleotide sequence encoding a polypeptide (or protein) or a domain or fragment thereof. Additionally, the polynucleotide may comprise a promoter, an intron, an enhancer region, a polyadenylation site, a translation initiation site, 5′ or 3′ untranslated regions, a reporter gene, a selectable marker, or the like. The polynucleotide can be single stranded or double stranded DNA or RNA. The polynucleotide optionally comprises modified bases or a modified backbone. The polynucleotide can be, e.g., genomic DNA or RNA, a transcript (such as an mRNA), a cDNA, a PCR product, a cloned DNA, a synthetic DNA or RNA, or the like. The polynucleotide can be combined with carbohydrate, lipids, protein, or other materials to perform a particular activity such as transformation or form a useful composition such as a peptide nucleic acid (PNA). The polynucleotide can comprise a sequence in either sense or antisense orientations. “Oligonucleotide” is substantially equivalent to the terms amplimer, primer, oligomer, element, target, and probe and is preferably single stranded.

[0068] “Gene” or “gene sequence” refers to the partial or complete coding sequence of a gene, its complement, and its 5′ or 3′ untranslated regions. A gene is also a functional unit of inheritance, and in physical terms is a particular segment or sequence of nucleotides along a molecule of DNA (or RNA, in the case of RNA viruses) involved in producing a polypeptide chain. The latter may be subjected to subsequent processing such as splicing and folding to obtain a functional protein or polypeptide. A gene may be isolated, partially isolated, or be found with an organism's genome. By way of example, a transcription factor gene encodes a transcription factor polypeptide, which may be functional or require processing to function as an initiator of transcription.

[0069] Operationally, genes may be defined by the cis-trans test, a genetic test that determines whether two mutations occur in the same gene and which may be used to determine the limits of the genetically active unit (Rieger et al. (1976) Glossary of Genetics and Cytogenetics: Classical and Molecular, 4th ed., Springer Verlag. Berlin). A gene generally includes regions preceding (“leaders”; upstream) and following (“trailers”; downstream) of the coding region. A gene may also include intervening, non-coding sequences, referred to as “introns”, located between individual coding segments, referred to as “exons”. Most genes have an associated promoter region, a regulatory sequence 5′ of the transcription initiation codon (there are some genes that do not have an identifiable promoter). The function of a gene may also be regulated by enhancers, operators, and other regulatory elements.

[0070] A “recombinant polynucleotide” is a polynucleotide that is not in its native state, e.g., the polynucleotide comprises a nucleotide sequence not found in nature, or the polynucleotide is in a context other than that in which it is naturally found, e.g., separated from nucleotide sequences with which it typically is in proximity in nature, or adjacent (or contiguous with) nucleotide sequences with which it typically is not in proximity. For example, the sequence at issue can be cloned into a vector, or otherwise recombined with one or more additional nucleic acid.

[0071] An “isolated polynucleotide” is a polynucleotide whether naturally occurring or recombinant, that is present outside the cell in which it is typically found in nature, whether purified or not. Optionally, an isolated polynucleotide is subject to one or more enrichment or purification procedures, e.g., cell lysis, extraction, centrifugation, precipitation, or the like.

[0072] A “polypeptide” is an amino acid sequence comprising a plurality of consecutive polymerized amino acid residues e.g., at least about 15 consecutive polymerized amino acid residues, optionally at least about 30 consecutive polymerized amino acid residues, at least about 50 consecutive polymerized amino acid residues. In many instances, a polypeptide comprises a polymerized amino acid residue sequence that is a transcription factor or a domain or portion or fragment thereof. Additionally, the polypeptide may comprise 1) a localization domain, 2) an activation domain, 3) a repression domain, 4) an oligomerization domain, or 5) a DNA-binding domain, or the like. The polypeptide optionally comprises modified amino acid residues, naturally occurring amino acid residues not encoded by a codon, non-naturally occurring amino acid residues.

[0073] “Protein” refers to an amino acid sequence, oligopeptide, peptide, polypeptide or portions thereof whether naturally occurring or synthetic.

[0074] “Portion”, as used herein, refers to any part of a protein used for any purpose, but especially for the screening of a library of molecules which specifically bind to that portion or for the production of antibodies.

[0075] A “recombinant polypeptide” is a polypeptide produced by translation of a recombinant polynucleotide. A “synthetic polypeptide” is a polypeptide created by consecutive polymerization of isolated amino acid residues using methods well known in the art. An “isolated polypeptide,” whether a naturally occurring or a recombinant polypeptide, is more enriched in (or out of) a cell than the polypeptide in its natural state in a wild-type cell, e.g., more than about 5% enriched, more than about 10% enriched, or more than about 20%, or more than about 50%, or more, enriched, i.e., alternatively denoted: 105%, 110%, 120%, 150% or more, enriched relative to wild type standardized at 100%. Such an enrichment is not the result of a natural response of a wild-type plant. Alternatively, or additionally, the isolated polypeptide is separated from other cellular components with which it is typically associated, e.g., by any of the various protein purification methods herein.

[0076] “Homology” refers to sequence similarity between a reference sequence and at least a fragment of a newly sequenced clone insert or its encoded amino acid sequence. Additionally, the terms “homology” and “homologous sequence(s)” may refer to one or more polypeptide sequences that are modified by chemical or enzymatic means. The homologous sequence may be a sequence modified by lipids, sugars, peptides, organic or inorganic compounds, by the use of modified amino acids or the like. Protein modification techniques are illustrated in Ausubel et al. (eds) Current Protocols in Molecular Biology, John Wiley & Sons (1998).

[0077] “Hybridization complex” refers to a complex between two nucleic acid molecules by virtue of the formation of hydrogen bonds between purines and pyrimidines.

[0078] “Identity” or “similarity” refers to sequence similarity between two polynucleotide sequences or between two polypeptide sequences, with identity being a more strict comparison. The phrases “percent identity” and “% identity” refer to the percentage of sequence similarity found in a comparison of two or more polynucleotide sequences or two or more polypeptide sequences. “Sequence similarity” refers to the percent similarity in base pair sequence (as determined by any suitable method) between two or more polynucleotide sequences. Two or more sequences can be anywhere from 0-100% similar, or any integer value therebetween. Identity or similarity can be determined by comparing a position in each sequence that may be aligned for purposes of comparison. When a position in the compared sequence is occupied by the same nucleotide base or amino acid, then the molecules are identical at that position. A degree of similarity or identity between polynucleotide sequences is a function of the number of identical or matching nucleotides at positions shared by the polynucleotide sequences. A degree of identity of polypeptide sequences is a function of the number of identical amino acids at positions shared by the polypeptide sequences. A degree of homology or similarity of polypeptide sequences is a function of the number of amino acids at positions shared by the polypeptide sequences.

[0079] With regard to polypeptides, the terms “substantial identity” or “substantially identical” may refer to sequences of sufficient similarity and structure to the transcription factors in the Sequence Listing to produce similar function when expressed or overexpressed in a plant; in the present invention, this function is increased tolerance to drought. Sequences that are at least about 50% identical, and preferably at least 82% identical, to the instant polypeptide sequences are considered to have “substantial identity” with the latter. Sequences having lesser degrees of identity but comparable biological activity are considered to be equivalents. The structure required to maintain proper functionality is related to the tertiary structure of the polypeptide. There are discreet domains and motifs within a transcription factor that must be present within the polypeptide to confer function and specificity. These specific structures are required so that interactive sequences will be properly oriented to retain the desired activity. “Substantial identity” may thus also be used with regard to subsequences, for example, motifs, that are of sufficient structure and similarity, being at least about 50% identical, and preferably at least 82% identical, to similar motifs in other related sequences so that each confers or is required for increased tolerance to drought.

[0080] The term “amino acid consensus motif” refers to the portion or subsequence of a polypeptide sequence that is substantially conserved among the polypeptide transcription factors listed in the Sequence Listing.

[0081] “Alignment” refers to a number of nucleotide or amino acid residue sequences aligned by lengthwise comparison so that components in common (i.e., nucleotide bases or amino acid residues) may be visually and readily identified. The fraction or percentage of components in common is related to the homology or identity between the sequences. Alignments such as those found the Figures may be used to identify conserved domains and relatedness within these domains. An alignment may suitably be determined by means of computer programs known in the art, such as MacVector (1999) (Accelrys, Inc., San Diego, Calif.).

[0082] A “conserved domain” or “conserved region” as used herein refers to a region in heterologous polynucleotide or polypeptide sequences where there is a relatively high degree of sequence identity between the distinct sequences. AP2 domains are examples of conserved domains.

[0083] With respect to polynucleotides encoding presently disclosed transcription factors, a conserved domain is preferably at least 10 base pairs (bp) in length.

[0084] A “conserved domain”, with respect to presently disclosed polypeptides refers to a domain within a transcription factor family that-exhibits a higher degree of sequence homology, such as at least 70% sequence similarity, including conservative substitutions, and more preferably at least 79% sequence identity, and even more preferably at least 81%, or at least about 86%, or at least about 87%, or at least about 89%, or at least about 91%, or at least about 95%, or at least about 98% amino acid residue sequence identity of a polypeptide of consecutive amino acid residues. A fragment or domain can be referred to as outside a conserved domain, outside a consensus sequence, or outside a consensus DNA-binding site that is known to exist or that exists for a particular transcription factor class, family, or sub-family. In this case, the fragment or domain will not include the exact amino acids of a consensus sequence or consensus DNA-binding site of a transcription factor class, family or sub-family, or the exact amino acids of a particular transcription factor consensus sequence or consensus DNA-binding site. Furthermore, a particular fragment, region, or domain of a polypeptide, or a polynucleotide encoding a polypeptide, can be “outside a conserved domain” if all the amino acids of the fragment, region, or domain fall outside of a defined conserved domain(s) for a polypeptide or protein. Sequences having lesser degrees of identity but comparable biological activity are considered to be equivalents.

[0085] As one of ordinary skill in the art recognizes, conserved domains may be identified as regions or domains of identity to a specific consensus sequence (see, for example, Riechmann et al. (2000) supra). Thus, by using alignment methods well known in the art, the conserved domains (i.e., the AP2 domains) of the AP2 plant transcription factors (Riechmann and Meyerowitz (1998) Biol. Chem. 379:633-646) may be determined.

[0086] The conserved domains for a number of the sequences of the Sequence Listing are found in Table 1. A comparison of the regions of the polypeptides in Table 1 allows one of skill in the art to identify conserved domains for any of the polypeptides listed or referred to in this disclosure.

[0087] “Complementary” refers to the natural hydrogen bonding by base pairing between purines and pyrimidines. For example, the sequence A-C-G-T (5′→3′) forms hydrogen bonds with its complements A-C-G-T (5′→3′) or A-C-G-U (5′→3′). Two single-stranded molecules may be considered partially complementary, if only some of the nucleotides bond, or “completely complementary” if all of the nucleotides bond. The degree of complementarity between nucleic acid strands affects the efficiency and strength of the hybridization and amplification reactions. “Fully complementary” refers to the case where bonding occurs between every base pair and its complement in a pair of sequences, and the two sequences have the same number of nucleotides.

[0088] The terms “highly stringent” or “highly stringent condition” refer to conditions that permit hybridization of DNA strands whose sequences are highly complementary, wherein these same conditions exclude hybridization of significantly mismatched DNAs. Polynucleotide sequences capable of hybridizing under stringent conditions with the polynucleotides of the present invention may be, for example, variants of the disclosed polynucleotide sequences, including allelic or splice variants, or sequences that encode orthologs or paralogs of presently disclosed polypeptides. Nucleic acid hybridization methods are disclosed in detail by Kashima et al. (1985) Nature 313:402-404, and Sambrook et al. (1989) Molecular Cloning: A Laboratory Manual, 2nd Ed., Cold Spring Harbor Laboratory, Cold Spring Harbor, N.Y. (“Sambrook”); and by Haymes et al., “Nucleic Acid Hybridization: A Practical Approach”, IRL Press, Washington, D.C. (1985), which references are incorporated herein by reference.

[0089] In general, stringency is determined by the temperature, ionic strength, and concentration of denaturing agents (e.g., formamide) used in a hybridization and washing procedure (for a more detailed description of establishing and determining stringency, see below). The degree to which two nucleic acids hybridize under various conditions of stringency is correlated with the extent of their similarity. Thus, similar nucleic acid sequences from a variety of sources, such as within a plant's genome (as in the case of paralogs) or from another plant (as in the case of orthologs) that may perform similar functions can be isolated on the basis of their ability to hybridize with known transcription factor sequences. Numerous variations are possible in the conditions and means by which nucleic acid hybridization can be performed to isolate transcription factor sequences having similarity to transcription factor sequences known in the art and are not limited to those explicitly disclosed herein. Such an approach may be used to isolate polynucleotide sequences having various degrees of similarity with disclosed transcription factor sequences, such as, for example, transcription factors having 60% identity, or more preferably greater than about 70% identity, most preferably 72% or greater identity with disclosed transcription factors.

[0090] Regarding the terms “paralog” and “ortholog”, homologous polynucleotide sequences and homologous polypeptide sequences may be paralogs or orthologs of the claimed polynucleotide or polypeptide sequence. Orthologs and paralogs are evolutionarily related genes that have similar sequence and similar functions. Orthologs are structurally related genes in different species that are derived by a speciation event. Paralogs are structurally related genes within a single species that are derived by a duplication event. Sequences that are sufficiently similar to one another will be appreciated by those of skill in the art and may be based upon percentage identity of the complete sequences, percentage identity of a conserved domain or sequence within the complete sequence, percentage similarity to the complete sequence, percentage similarity to a conserved domain or sequence within the complete sequence, and/or an arrangement of contiguous nucleotides or peptides particular to a conserved domain or complete sequence. Sequences that are sufficiently similar to one another will also bind in a similar manner to the same DNA binding sites of transcriptional regulatory elements using methods well known to those of skill in the art.

[0091] The term “equivalog” describes members of a set of homologous proteins that are conserved with respect to function since their last common ancestor. Related proteins are grouped into equivalog families, and otherwise into protein families with other hierarchically defined homology types. This definition is provided at the Institute for Genomic Research (TIGR) world wide web (www) website, “tigr.org” under the heading “Terms associated with TIGRFAMs”.

[0092] The term “variant”, as used herein, may refer to polynucleotides or polypeptides, that differ from the presently disclosed polynucleotides or polypeptides, respectively, in sequence from each other, and as set forth below.

[0093] With regard to polynucleotide variants, differences between presently disclosed polynucleotides and polynucleotide variants are limited so that the nucleotide sequences of the former and the latter are closely similar overall and, in many regions, identical. Due to the degeneracy of the genetic code, differences between the former and latter nucleotide sequences o may be silent (i.e., the amino acids encoded by the polynucleotide are the same, and the variant polynucleotide sequence encodes the same amino acid sequence as the presently disclosed polynucleotide. Variant nucleotide sequences may encode different amino acid sequences, in which case such nucleotide differences will result in amino acid substitutions, additions, deletions, insertions, truncations or fusions with respect to the similar disclosed polynucleotide sequences. These variations result in polynucleotide variants encoding polypeptides that share at least one functional characteristic. The degeneracy of the genetic code also dictates that many different variant polynucleotides can encode identical and/or substantially similar polypeptides in addition to those sequences illustrated in the Sequence Listing.

[0094] Presently disclosed polypeptide sequences and similar polypeptide variants may differ in amino acid sequence by one or more substitutions, additions, deletions, fusions and truncations, which may be present in any combination. These differences may produce silent changes and result in a functionally equivalent transcription factor. Thus, it will be readily appreciated by those of skill in the art, that any of a variety of polynucleotide sequences is capable of encoding the transcription factors and transcription factor homolog polypeptides of the invention. A polypeptide sequence variant may have “conservative” changes, wherein a substituted amino acid has similar structural or chemical properties. Deliberate amino acid substitutions may thus be made on the basis of similarity in polarity, charge, solubility, hydrophobicity, hydrophilicity, and/or the amphipathic nature of the residues, as long as the functional or biological activity of the transcription factor is retained. For example, negatively charged amino acids may include aspartic acid and glutamic acid, positively charged amino acids may include lysine and arginine, and amino acids with uncharged polar head groups having similar hydrophilicity values may include leucine, isoleucine, and valine; glycine and alanine; asparagine and glutamine; serine and threonine; and phenylalanine and tyrosine (for more detail on conservative substitutions, see Table 3). More rarely, a variant may have “non-conservative” changes, for example, replacement of a glycine with a tryptophan. Similar minor variations may also include amino acid deletions or insertions, or both. Related polypeptides may comprise, for example, additions and/or deletions of one or more N-linked or O-linked glycosylation sites, or an addition and/or a deletion of one or more cysteine residues. Guidance in determining which and how many amino acid residues may be substituted, inserted or deleted without abolishing functional or biological activity may be found using computer programs well known in the art, for example, DNASTAR software (see U.S. Pat. No. 5,840,544).

[0095] Also within the scope of the invention is a variant of a transcription factor nucleic acid listed in the Sequence Listing, that is, one having a sequence that differs from the one of the polynucleotide sequences in the Sequence Listing, or a complementary sequence, that encodes a functionally equivalent polypeptide (i.e., a polypeptide having some degree of equivalent or similar biological activity) but differs in sequence from the sequence in the Sequence Listing, due to degeneracy in the genetic code. Included within this definition are polymorphisms that may or may not be readily detectable using a particular oligonucleotide probe of the polynucleotide encoding polypeptide, and improper or unexpected hybridization to allelic variants, with a locus other than the normal chromosomal locus for the polynucleotide sequence encoding polypeptide.

[0096] “Allelic variant” or “polynucleotide allelic variant” refers to any of two or more alternative forms of a gene occupying the same chromosomal locus. Allelic variation arises naturally through mutation, and may result in phenotypic polymorphism within populations. Gene mutations may be “silent” or may encode polypeptides having altered amino acid sequence. “Allelic variant” and “polypeptide allelic variant” may also be used with respect to polypeptides, and in this case the term refer to a polypeptide encoded by an allelic variant of a gene.

[0097] “Splice variant” or “polynucleotide splice variant” as used herein refers to alternative forms of RNA transcribed from a gene. Splice variation naturally occurs as a result of alternative sites being spliced within a single transcribed RNA molecule or between separately transcribed RNA molecules, and may result in several different forms of mRNA transcribed from the same gene. This, splice variants may encode polypeptides having different amino acid sequences, which may or may not have similar functions in the organism. “Splice variant” or “polypeptide splice variant” may also refer to a polypeptide encoded by a splice variant of a transcribed mRNA.

[0098] As used herein, “polynucleotide variants” may also refer to polynucleotide sequences that encode paralogs and orthologs of the presently disclosed polypeptide sequences. “Polypeptide variants” may refer to polypeptide sequences that are paralogs and orthologs of the presently disclosed polypeptide sequences.

[0099] “Ligand” refers to any molecule, agent, or compound that will bind specifically to a complementary site on a nucleic acid molecule or protein. Such ligands stabilize or modulate the activity of nucleic acid molecules or proteins of the invention and may be composed of at least one of the following: inorganic and organic substances including nucleic acids, proteins, carbohydrates, fats, and lipids.

[0100] “Modulates” refers to a change in activity (biological, chemical, or immunological) or lifespan resulting from specific binding between a molecule and either a nucleic acid molecule or a protein.

[0101] The term “plant” includes whole plants, shoot vegetative organs/structures (for example, leaves, stems and tubers), roots, flowers and floral organs/structures (for example, bracts, sepals, petals, stamens, carpels, anthers and ovules), seed (including embryo, endosperm, and seed coat) and fruit (the mature ovary), plant tissue (for example, vascular tissue, ground tissue, and the like) and cells (for example, guard cells, egg cells, and the like), and progeny of same. The class of plants that can be used in the method of the invention is generally as broad as the class of higher and lower plants amenable to transformation techniques, including angiosperms (monocotyledonous and dicotyledonous plants), gymnosperms, ferns, horsetails, psilophytes, lycophytes, bryophytes, and multicellular algae. (See for example, FIG. 1, adapted from Daly et al. (2001) Plant Physiol. 127: 1328-1333; FIG. 2, adapted from Ku et al. (2000) Proc. Natl. Acad. Sci. 97: 9121-9126; and see also Tudge in The Variety of Life, Oxford University Press, New York, N.Y. (2000) pp. 547-606).

[0102] A “transgenic plant” refers to a plant that contains genetic material not found in a wild-type plant of the same species, variety or cultivar. The genetic material may include a transgene, an insertional mutagenesis event (such as by transposon or T-DNA insertional mutagenesis), an activation tagging sequence, a mutated sequence, a homologous recombination event or a sequence modified by chimeraplasty. Typically, the foreign genetic material has been introduced into the plant by human manipulation, but any method can be used as one of skill in the art recognizes.

[0103] A transgenic plant may contain an expression vector or cassette. The expression cassette typically comprises a polypeptide-encoding sequence operably linked (i.e., under regulatory control of) to appropriate inducible or constitutive regulatory sequences that allow for the expression of polypeptide. The expression cassette can be introduced into a plant by transformation or by breeding after transformation of a parent plant. A plant refers to a whole plant as well as to a plant part, such as seed, fruit, leaf, or root, plant tissue, plant cells or any other plant material, for example, a plant explant, as well as to progeny thereof, and to in vitro systems that mimic biochemical or cellular components or processes in a cell.

[0104] “Control plant” refers to a plant that serves as a standard of comparison for testing the results of a treatment or genetic alteration, or the degree of altered expression of a gene or gene product. Examples of control plants include plants that are untreated, or genetically unaltered (i.e., wild type).

[0105] “Wild type”, as used herein, refers to a cell, tissue or plant that has not been genetically modified to knock out or overexpress one or more of the presently disclosed transcription factors. Wild-type cells, tissue or plants may be used as controls to compare levels of expression and the extent and nature of trait modification with cells, tissue or plants in which transcription factor expression is altered or ectopically expressed, e.g., in that it has been knocked out or overexpressed.

[0106] “Fragment”, with respect to a polynucleotide, refers to a clone or any part of a polynucleotide molecule that retains a usable, functional characteristic. Useful fragments include oligonucleotides and polynucleotides that may be used in hybridization or amplification technologies or in the regulation of replication, transcription or translation. A polynucleotide fragment” refers to any subsequence of a polynucleotide, typically, of at least about 9 consecutive nucleotides, preferably at least about 30 nucleotides, more preferably at least about 50 nucleotides, of any of the sequences provided herein. Exemplary polynucleotide fragments are the first sixty consecutive nucleotides of the transcription factor polynucleotides listed in the Sequence Listing. Exemplary fragments also include fragments that comprise a region that encodes an AP2 domain of a transcription factor.

[0107] Fragments may also include subsequences of polypeptides and protein molecules, or a subsequence of the polypeptide. Fragments may have uses in that they may have antigenic potential. In some cases, the fragment or domain is a subsequence of the polypeptide which performs at least one biological function of the intact polypeptide in substantially the same manner, or to a similar extent, as does the intact polypeptide. For example, a polypeptide fragment can comprise a recognizable structural motif or functional domain such as a DNA-binding site or domain that binds to a DNA promoter region, an activation domain, or a domain for protein-protein interactions, and may initiate transcription. Fragments can vary in size from as few as 3 amino acid residues to the full length of the intact polypeptide, but are preferably at least about 30 amino acid residues in length and more preferably at least about 60 amino acid residues in length. Exemplary polypeptide fragments are the first twenty consecutive amino acids of a mammalian protein encoded by are the first twenty consecutive amino acids of the transcription factor polypeptides listed in the Sequence Listing. Exemplary fragments also include fragments that comprise an AP2 domain of a transcription factor, for example, amino acid residues 10-77 of G2133 (SEQ ID NO: 12), as noted in Table 1.

[0108] The invention also encompasses production of DNA sequences that encode transcription factors and transcription factor derivatives, or fragments thereof, entirely by synthetic chemistry. After production, the synthetic sequence may be inserted into any of the many available expression vectors and cell systems using reagents well known in the art. Moreover, synthetic chemistry may be used to introduce mutations into a sequence encoding transcription factors or any fragment thereof.

[0109] “Derivative” refers to the chemical modification of a nucleic acid molecule or amino acid sequence. Chemical modifications can include replacement of hydrogen by an alkyl, acyl, or amino group or glycosylation, pegylation, or any similar process that retains or enhances biological activity or lifespan of the molecule or sequence.

[0110] A “trait” refers to a physiological, morphological, biochemical, or physical characteristic of a plant or particular plant material or cell. In some instances, this characteristic is visible to the human eye, such as seed or plant size, or can be measured by biochemical techniques, such as detecting the protein, starch, or oil content of seed or leaves, or by observation of a metabolic or physiological process, e.g. by measuring tolerance to water deprivation or particular salt or sugar concentrations, or by the observation of the expression level of a gene or genes, for example, by employing Northern analysis, RT-PCR, microarray gene expression assays, or reporter gene expression systems, or by agricultural observations such as drought stress tolerance or yield. Any technique can be used to measure the amount of, comparative level of, or difference in any selected chemical compound or macromolecule in the transgenic plants, however.

[0111] “Trait modification” refers to a detectable difference in a characteristic in a plant ectopically expressing a polynucleotide or polypeptide of the present invention relative to a plant not doing so, such as a wild-type plant. In some cases, the trait modification can be evaluated quantitatively. For example, the trait modification can entail at least about a 2% increase or decrease in an observed trait (difference), at least a 5% difference, at least about a 10% difference, at least about a 20% difference, at least about a 30%, at least about a 50%, at least about a 70%, or at least about a 100%, or an even greater difference compared with a wild-type plant. It is known that there can be a natural variation in the modified trait. Therefore, the trait modification observed entails a change of the normal distribution of the trait in the plants compared with the distribution observed in wild-type plants.

[0112] The term “transcript profile” refers to the expression levels of a set of genes in a cell in a particular state, particularly by comparison with the expression levels of that same set of genes in a cell of the same type in a reference state. For example, the transcript profile of a particular transcription factor in a suspension cell is the expression levels of a set of genes in a cell repressing or overexpressing that transcription factor compared with the expression levels of that same set of genes in a suspension cell that has normal levels of that transcription factor. The transcript profile can be presented as a list of those genes whose expression level is significantly different between the two treatments, and the difference ratios. Differences and similarities between expression levels may also be evaluated and calculated using statistical and clustering methods.

[0113] “Ectopic expression or altered expression” in reference to a polynucleotide indicates that the pattern of expression in, for example, a transgenic plant or plant tissue, is different from the expression pattern in a wild-type plant or a reference plant of the same species. The pattern of expression may also be compared with a reference expression pattern in a wild-type plant of the same species. For example, the polynucleotide or polypeptide is expressed in a cell or tissue type other than a cell or tissue type in which the sequence is expressed in the wild-type plant, or by expression at a time other than at the time the sequence is expressed in the wild-type plant, or by a response to different inducible agents, such as hormones or environmental signals, or at different expression levels (either higher or lower) compared with those found in a wild-type plant. The term also refers to altered expression patterns that are produced by lowering the levels of expression to below the detection level or completely abolishing expression. The resulting expression pattern can be transient or stable, constitutive or inducible. In reference to a polypeptide, the term “ectopic expression or altered expression” further may relate to altered activity levels resulting from the interactions of the polypeptides with exogenous or endogenous modulators or from interactions with factors or as a result of the chemical modification of the polypeptides.

[0114] The term “overexpression” as used herein refers to a greater expression level of a gene in a plant, plant cell or plant tissue, compared to expression in a wild-type plant, cell or tissue, at any developmental or temporal stage for the gene. Overexpression can occur when, for example, the genes encoding one or more transcription factors are under the control of a strong expression signal, such as one of the promoters described herein (for example, the cauliflower mosaic virus 35S transcription initiation region). Overexpression may occur throughout a plant or in specific tissues of the plant, depending on the promoter used, as described below.

[0115] Overexpression may take place in plant cells normally lacking expression of polypeptides functionally equivalent or identical to the present transcription factors. Overexpression may also occur in plant cells where endogenous expression of the present transcription factors or functionally equivalent molecules normally occurs, but such normal expression is at a lower level.

[0116] Overexpression thus results in a greater than normal production, or “overproduction” of the transcription factor in the plant, cell or tissue.

[0117] The term “transcription regulating region” refers to a DNA regulatory sequence that regulates expression of one or more genes in a plant when a transcription factor having one or more specific binding domains binds to the DNA regulatory sequence. Transcription factors of the present invention may possess, for example, an AP2 domain, in which case the AP2 domain of the transcription factor binds to a transcription regulating region, such as AtERF1, which binds to the motif AGCCGCC (the “GCC box”) that are present in promoters of genes such as PDF1.2. The transcription factors of the invention also comprise an amino acid subsequence that forms a transcription activation domain that regulates expression of one or more abiotic stress tolerance genes in a plant when the transcription factor binds to the regulating region.

[0118] The term “phase change” refers to a plant's progression from embryo to adult, and, by some definitions, the transition wherein flowering plants gain reproductive competency. It is believed that phase change occurs either after a certain number of cell divisions in the shoot apex of a developing plant, or when the shoot apex achieves a particular distance from the roots. Thus, altering the timing of phase changes may affect a plant's size, which, in turn, may affect yield and biomass.

[0119] A “sample” with respect to a material containing nucleic acid molecules may comprise a bodily fluid; an extract from a cell, chromosome, organelle, or membrane isolated from a cell; genomic DNA, RNA, or cDNA in solution or bound to a substrate; a cell; a tissue; a tissue print; a forensic sample; and the like. In this context “substrate” refers to any rigid or semi-rigid support to which nucleic acid molecules or proteins are bound and includes membranes, filters, chips, slides, wafers, fibers, magnetic or nonmagnetic beads, gels, capillaries or other tubing, plates, polymers, and microparticles with a variety of surface forms including wells, trenches, pins, channels and pores. A substrate may also refer to a reactant in a chemical or biological reaction, or a substance acted upon (for example, by an enzyme).

[0120] “Substantially purified” refers to nucleic acid molecules or proteins that are removed from their natural environment and are isolated or separated, and are at least about 60% free, preferably about 75% free, and most preferably about 90% free, from other components with which they are naturally associated.

### DETAILED DESCRIPTION

Transcription Factors Modify Expression of Endogenous Genes

[0121] A transcription factor may include, but is not limited to, any polypeptide that can activate or repress transcription of a single gene or a number of genes. As one of ordinary skill in the art recognizes, transcription factors can be identified by the presence of a region or domain of structural similarity or identity to a specific consensus sequence or the presence of a specific consensus DNA-binding site or DNA-binding site motif (see, for example, Riechmann et al. (2000) Science 290: 2105-2110). The plant transcription factors may belong to the AP2 protein transcription factor family (Riechmann and Meyerowitz (1998) supra).

[0122] Generally, the transcription factors encoded by the present sequences are involved in cell differentiation and proliferation and the regulation of growth. Accordingly, one skilled in the art would recognize that by expressing the present sequences in a plant, one may change the expression of autologous genes or induce the expression of introduced genes. By affecting the expression of similar autologous sequences in a plant that have the biological activity of the present sequences, or by introducing the present sequences into a plant, one may alter a plant's phenotype to one with improved traits related to drought stress. The sequences of the invention may also be used to transform a plant and introduce desirable traits not found in the wild-type cultivar or strain. Plants may then be selected for those that produce the most desirable degree of over- or under-expression of target genes of interest and coincident trait improvement.

[0123] The sequences of the present invention may be from any species, particularly plant species, in a naturally occurring form or from any source whether natural, synthetic, semi-synthetic or recombinant. The sequences of the invention may also include fragments of the present amino acid sequences. Where “amino acid sequence” is recited to refer to an amino acid sequence of a naturally occurring protein molecule, “amino acid sequence” and like terms are not meant to limit the amino acid sequence to the complete native amino acid sequence associated with the recited protein molecule.

[0124] In addition to methods for modifying a plant phenotype by employing one or more polynucleotides and polypeptides of the invention described herein, the polynucleotides and polypeptides of the invention have a variety of additional uses. These uses include their use in the recombinant production (i.e., expression) of proteins; as regulators of plant gene expression, as diagnostic probes for the presence of complementary or partially complementary nucleic acids (including for detection of natural coding nucleic acids); as substrates for further reactions, for example, mutation reactions, PCR reactions, or the like; as substrates for cloning for example, including digestion or ligation reactions; and for identifying exogenous or endogenous modulators of the transcription factors. In many instances, a polynucleotide comprises a nucleotide sequence encoding a polypeptide (or protein) or a domain or fragment thereof. Additionally, the polynucleotide may comprise a promoter, an intron, an enhancer region, a polyadenylation site, a translation initiation site, 5′ or 3′ untranslated regions, a reporter gene, a selectable marker, or the like. The polynucleotide can be single stranded or double stranded DNA or RNA. The polynucleotide optionally comprises modified bases or a modified backbone. The polynucleotide can be, for example, genomic DNA or RNA, a transcript (such as an mRNA), a cDNA, a PCR product, a cloned DNA, a synthetic DNA or RNA, or the like. The polynucleotide can comprise a sequence in either sense or antisense orientations.

[0125] Expression of genes that encode transcription factors that modify expression of endogenous genes, polynucleotides, and proteins are well known in the art. In addition, transgenic plants comprising isolated polynucleotides encoding transcription factors may also modify expression of endogenous genes, polynucleotides, and proteins. Examples include Peng et al. (1997) Genes Development 11: 3194-3205, and Peng et al. (1999) Nature, 400: 256-261). In addition, many others have demonstrated that an Arabidopsis transcription factor expressed in an exogenous plant species elicits the same or very similar phenotypic response (see, for example, Fu et al. (2001) Plant Cell 13: 1791-1802; Nandi et al. (2000) Curr. Biol. 10: 215-218; Coupland (1995) Nature 377: 482-483; and Weigel and Nilsson (1995) Nature 377: 482-500).

[0126] In another example, Mandel et al. (1992) Cell 71-133-143), and Suzuki et al. (2001) Plant J. 28: 409-418 teach that a transcription factor expressed in another plant species elicits the same or very similar phenotypic response of the endogenous sequence, as often predicted in earlier studies of Arabidopsis transcription factors in Arabidopsis (see Mandel et al. (1992) supra; Suzuki et al. (2001) supra).

[0127] Other examples include Müller et al. (2001) Plant J. 28: 169-179); Kim et al. (2001) Plant J. 25: 247-259); Kyozuka and Shimamoto (2002) Plant Cell Physiol. 43: 130-135); Boss and Thomas (2002) Nature, 416: 847-850); He et al. (2000) Transgenic Res. 9: 223-227); and Robson et al. (2001) Plant J. 28: 619-631).

[0128] In yet another example, Gilmour et al. (1998) Plant J. 16: 433442, teach an Arabidopsis AP2 transcription factor, CBF1 (SEQ ID NO: 422), which, when overexpressed in transgenic plants, increases plant freezing tolerance. Jaglo et al. (2001) Plant Physiol. 127: 910-917, further identified sequences in Brassica napus which encode CBF-like genes and that transcripts for these genes accumulated rapidly in response to low temperature. Transcripts encoding CBF-like proteins were also found to accumulate rapidly in response to low temperature in wheat, as well as in tomato. An alignment of the CBF proteins from Arabidopsis, B. napus, wheat, rye, and tomato revealed the presence of conserved consecutive amino acid residues, PKK/RPAGRxKFxETRHP and DSAWR, that bracket the AP2/EREBP DNA binding domains of the proteins and distinguish them from other members of the AP2/EREBP protein family (Jaglo et al. (2001) supra).

[0129] Transcription factors mediate cellular responses and control traits through altered expression of genes containing cis-acting nucleotide sequences that are targets of the introduced transcription factor. It is well appreciated in the art that the effect of a transcription factor on cellular responses or a cellular trait is determined by the particular genes whose expression is either directly or indirectly (for example, by a cascade of transcription factor binding events and transcriptional changes) altered by transcription factor binding. In a global analysis of transcription comparing a standard condition with one in which a transcription factor is overexpressed, the resulting transcript profile associated with transcription factor overexpression is related to the trait or cellular process controlled by that transcription factor. For example, the PAP2 gene (and other genes in the MYB family) have been shown to control anthocyanin biosynthesis through regulation of the expression of genes known to be involved in the anthocyanin biosynthetic pathway (Bruce et al. (2000) Plant Cell, 12: 65-79; Borevitz et al. (2000) Plant Cell 12: 2383-93). Further, global transcript profiles have been used successfully as diagnostic tools for specific cellular states (for example, cancerous vs. non-cancerous; Bhattacharjee et al. (2001) Proc Natl. Acad. Sci., USA, 98: 13790-13795; Xu et al. (2001) Proc. Natl. Acad. Sci., USA, 98: 15089-15094). Consequently, it is evident to one skilled in the art that similarity of transcript profile upon overexpression of different transcription factors would indicate similarity of transcription factor function.

Polypeptides and Polynucleotides of the Invention

[0130] The present invention provides, among other things, transcription factors (TFs), and transcription factor homolog polypeptides, and isolated or recombinant polynucleotides encoding the polypeptides, or novel sequence variant polypeptides or polynucleotides encoding novel variants of transcription factors derived from the specific sequences provided here.

[0131] The polynucleotides of the invention can be or were ectopically expressed in overexpressor plant cells and the changes in the expression levels of a number of genes, polynucleotides, and/or proteins of the plant cells observed. Therefore, the polynucleotides and polypeptides can be employed to change expression levels of a genes, polynucleotides, and/or proteins of plants. These polypeptides and polynucleotides may be employed to modify a plant's characteristics, particularly drought tolerance. The polynucleotides of the invention can be or were ectopically expressed in overexpressor or knockout plants and the changes in the characteristic(s) or trait(s) of the plants observed. Therefore, the polynucleotides and polypeptides can be employed to improve the characteristics of plants. The polypeptide sequences of the sequence listing, including Arabidopsis sequences G2133, G1274, G922, G2999, G3086, G354, G1792, G2053, G975, G1069, G916, G1820, G2701, G47, G2854, G2789, G634, G175, G2839, G1452, G3083, G489, G303, G2992, and G682, (SEQ ID NOs: 12, 6, 4, 14, 16, 228, 8, 10, 238, 240, 236, 244, 246, 2, 252, 248, 232, 224, 250, 242, 254, 230, 226, 50 and 234, respectively) have been shown to confer increased drought tolerance when these polypeptides are overexpressed in Arabidopsis plants. These polynucleotides have been shown to have a strong association with drought stress tolerance, in that plants that overexpress these sequences are more tolerant to drought. The invention also encompasses a complement of the polynucleotides. The polynucleotides are also useful for screening libraries of molecules or compounds for specific binding and for creating transgenic plants having increased osmotic stress tolerance. Altering the expression levels of equivalogs of these sequences, including paralogs and orthologs in the Sequence Listing, and other orthologs that are structurally and sequentially similar to the former orthologs, has been shown and is expected to confer similar phenotypes, including drought tolerance, in plants in some cases, exemplary polynucleotides encoding the polypeptides of the invention were identified in the Arabidopsis thaliana GenBank database using publicly available sequence analysis programs and parameters. Sequences initially identified were then further characterized to identify sequences comprising specified sequence strings corresponding to sequence motifs present in families of known transcription factors. In addition, further exemplary polynucleotides encoding the polypeptides of the invention were identified in the plant GenBank database using publicly available sequence analysis programs and parameters. Sequences initially identified were then further characterized to identify sequences comprising specified sequence strings corresponding to sequence motifs present in families of known transcription factors. Polynucleotide sequences meeting such criteria were confirmed as transcription factors.

[0132] Additional polynucleotides of the invention were identified by screening Arabidopsis thaliana and/or other plant cDNA libraries with probes corresponding to known transcription factors under low stringency hybridization conditions. Additional sequences, including full length coding sequences were subsequently recovered by the rapid amplification of cDNA ends (RACE) procedure, using a commercially available kit according to the manufacturer's instructions. Where necessary, multiple rounds of RACE are performed to isolate 5′ and 3′ ends. The full-length cDNA was then recovered by a routine end-to-end polymerase chain reaction (PCR) using primers specific to the isolated 5′ and 3′ ends. Exemplary sequences are provided in the Sequence Listing.

[0133] The polynucleotides are particularly useful when they are hybridizable array elements in a microarray. Such a microarray can be employed to monitor the expression of genes that are differentially expressed in response to drought or other osmotic stresses. The microarray can be used in large scale genetic or gene expression analysis of a large number of polynucleotides; or in the diagnosis of drought stress before phenotypic symptoms are evident. Furthermore, the microarray can be employed to investigate cellular responses, such as cell proliferation, transformation, and the like.

[0134] When the polynucleotides of the invention may also be used as hybridizable array elements in a microarray, the array elements are organized in an ordered fashion so that each element is present at a specified location on the substrate. Because the array elements are at specified locations on the substrate, the hybridization patterns and intensities (which together create a unique expression profile) can be interpreted in terms of expression levels of particular genes and can be correlated with a particular stress, pathology, or treatment.

[0135] The invention also entails an agronomic composition comprising a polynucleotide of the invention in conjunction with a suitable carrier and a method for altering a plant's trait using the composition.

[0136] Examples of specific polynucleotide and polypeptides of the invention, and equivalog sequences, along with descriptions of the gene families that comprise these polynucleotides and polypeptides, are provided below.

[0137] The AP2 family, including the G47/G2133 and G1792 clades. AP2 (APETALA2) and EREBPs (Ethylene-Responsive Element Binding Proteins) are the prototypic members of a family of transcription factors unique to plants, whose distinguishing characteristic is that they contain the so-called AP2 DNA-binding domain (for a review, see Riechmann and Meyerowitz (1998) Biol. Chem. 379: 633-646). The AP2 domain was first recognized as a repeated motif within the Arabidopsis thaliana AP2 protein (Jofuku et al. (1994) Plant Cell 6: 1211-1225). Shortly afterwards, four DNA-binding proteins from tobacco were identified that interact with a sequence that is essential for the responsiveness of some promoters to the plant hormone ethylene, and were designated as ethylene-responsive element binding proteins (EREBPs; Ohme-Takagi et al. (1995) Plant Cell 7: 173-182). The DNA-binding domain of EREBP-2 was mapped to a region that was common to all four proteins (Ohme-Takagi et al (1995) supra), and that was found to be closely related to the AP2 domain (Weigel (1995) Plant Cell 7: 388-389) but that did not bear sequence similarity to previously known DNA-binding motifs.

[0138] AP2/EREBP genes form a large family, with many members known in several plant species (Okamuro et al. (1997) Proc. Natl. Acad. Sci. USA 94: 7076-7081; Riechmann and Meyerowitz (1998) supra). The number of AP2/EREBP genes in the Arabidopsis thaliana genome is approximately 145 (Riechmann et al. (2000) Science 290: 2105-2110). The APETALA2 class is characterized by the presence of two AP2 DNA binding domains, and contains 14 genes. The AP2/ERF is the largest subfamily, and includes 125 genes which are involved in abiotic (DREB subgroup) and biotic (ERF subgroup) stress responses and the RAV subgroup includes 6 genes which all have a B3 DNA binding domain in addition to the AP2 DNA binding domain (Kagaya et al. (1999) Nucleic Acids Res. 27: 470-478).

[0139] Arabidopsis AP2 is involved in the specification of sepal and petal identity through its activity as a homeotic gene that forms part of the combinatorial genetic mechanism of floral organ identity determination and it is also required for normal ovule and seed development (Bowman et al. (1991) Development 112: 1-20; Jofuku et al. (1994) supra). Arabidopsis ANT is required for ovule development and it also plays a role in floral organ growth (Elliott et al. (1996) Plant Cell 8: 155-168; Klucher et al. (1996) Plant Cell 8: 137-153). Finally, maize G115 regulates leaf epidermal cell identity (Moose et al. (1996) Genes Dev. 10: 3018-3027).

[0140] The attack of a plant by a pathogen may induce defense responses that lead to resistance to the invasion, and these responses are associated with transcriptional activation of defense-related genes, among them those encoding pathogenesis-related (PR) proteins. The involvement of EREBP-like genes in controlling the plant defense response is based on the observation that many PR gene promoters contain a short cis-acting element that mediates their responsiveness to ethylene (ethylene appears to be one of several signal molecules controlling the activation of defense responses). Tobacco EREBP-1, -2, -3, and -4, and tomato Pti4, Pti5 and Pti6 proteins have been shown to recognize such cis-acting elements (Ohme-Takagi (1995) supra; Zhou et al. (1997) EMBO J. 16: 3207-3218). In addition, Pti4, Pti5, and Pti6 proteins have been shown to directly interact with Pto, a protein kinase that confers resistance against Pseudomonas syringae pv tomato (Zhou et al, (1997) supra). Plants are also challenged by adverse environmental conditions like cold or drought, and EREBP-like proteins appear to be involved in the responses to these abiotic stresses as well. COR (for cold-regulated) gene expression is induced during cold acclimation, the process by which plants increase their resistance to freezing in response to low unfreezing temperatures. The Arabidopsis EREBP-like gene CBF1 (Stockinger et al. (1997) Proc. Natl. Acad. Sci. USA 94: 1035-1040) is a regulator of the cold acclimation response, because ectopic expression of CBF1 in Arabidopsis transgenic plants induced COR gene expression in the absence of a cold stimulus, and the plant freezing tolerance was increased (Jaglo-Ottosen et al. (1998) Science 280: 104-106). Finally, another Arabidopsis EREBP-like gene, ABI4, is involved in abscisic acid (ABA) signal transduction, because abi4 mutants are insensitive to ABA (ABA is a plant hormone that regulates many agronomically important aspects of plant development; Finkelstein et al. (1998) Plant Cell 10: 1043-1054).

[0141] The SCR family, including the G922 clade. The SCARECROW gene, which regulates an asymmetric cell division essential for proper radial organization of root cell layers, was isolated from Arabidopsis thaliana by screening a genomic library with sequences flanking a T-DNA insertion causing a “scarecrow” mutation (Di Laurenzio et al. (1996) Cell 86, 423433). The gene product was tentatively described as a transcription factor based on the presence of homopolymeric stretches of several amino acids, the presence of a basic domain similar to that of the basic-leucine zipper family of transcription factors, and the presence of leucine heptad repeats. The presence of several Arabidopsis ESTs with gene products homologous to the SCARECROW gene were noted. The ability of the SCARECROW gene to complement the scarecrow mutation was also demonstrated (Malamy et al. (1997) Plant J. 12, 957-963).

[0142] More recently, the SCARECROW homologue RGA, which encodes a negative regulator of the gibberellin signal transduction pathway, was isolated from Arabidopsis by genomic subtraction (Silverstone et al. (1998) Plant Cell 10, 155-169). The RGA gene was shown to be expressed in many different tissues and the RGA protein was shown to be localized to the nucleus. The same gene was isolated by Truong (Truong et al. (1997) FEBS Lett. 410: 213-218) by identifying cDNA clones which complement a yeast nitrogen metabolism mutant, suggesting that RGA may be involved in regulating diverse metabolic processes. Another SCARECROW homologue designated GAI, which also is involved in gibberellin signaling processes, has been isolated by Peng (Peng et al. (1997) Genes Dev. 11, 3194-3205). Interestingly, GAI is the gene that initiated the Green Revolution. Peng et al. (Peng et al. (1999) Nature 6741, 256-261) have recently shown that maize GAI orthologs, when mutated, result in plants that are shorter, have increased seed yield, and are more resistant to damage by rain and wind than wild type plants. Based on the inclusion of the GAI, RGA and SCR genes in this family, it has also been referred to as the GRAS family (Pysh et al. (1999) Plant J 18, 111-19).

[0143] The scarecrow gene family has 32 members in the Arabidopsis genome.

[0144] The WRKY family, including the G1274 clade. The WRKY family of transcription factors is thus far only found in plants. It is primarily characterized by a 60 amino acid conserved DNA binding domain and a zinc finger domain. The family is divided into groups based on whether the protein has two or only one WRKY domain (Groups I and II, respectively), and further subdivided based on a unique variation of the zing finger motif (Group III) as described by Eulgem (Eulgem et al. (2000) Trends Plant Science 5:199-206). G1274 (polynucleotide SEQ ID NO: 5 and polypeptide SEQ ID NO: 6) belongs to the so-called Group II class of WRKY proteins, which can be further subdivided into 5 groups (a-e) based on conserved structural features outside of the WRKY domain. G1274 is a member of the IIc subgroup.

[0145] The phylogenetic tree in FIG. 23 uses other closely related members of the WRKY Group IIc family as a natural out-group to the G1274 clade. Using either the full protein, or WRKY domain, the potentially orthologous sequences shown on the tree appear most closely related to the G1274 paralog clade. FIG. 22 shows the aligned sequences of the full-length proteins, and FIG. 24 indicates amino acids within the WRKY domain that differentiate the G1274 clade from the out-group. Most notable in FIG. 24 are the conserved K at position 264, the N at position 275, the S at position 280, the D at 293 and the F/Y at position 299 (indicated by asterisks). These residues are potentially responsible for the conserved structure/function of this clade with regard to drought tolerance. Based on full-length protein sequence, G1758 appears firmly in the G1274 clade. FIG. 24 shows that, within the WRKY domain, G1758 is intermediate between the out-group and the claimed sequences. These amino acid differences may represent specific changes that retain drought tolerance function, or possibly more finely delineate the key residues required for function.

[0146] The NAC family, including the G2053 clade. The NAC family is a group of transcription factors that share a highly conserved N-terminal domain of about 150 amino acids, designated the NAC domain (NAC stands for Petunia, NAM, and Arabidopsis, ATAF1, ATAF2 and CUC2). This is believed to be a novel domain that is present in both monocot and dicot plants but is absent from yeast and animal proteins. One hundred and twelve members of the NAC family have been identified in the Arabidopsis genome. The NAC class of proteins can be divided into at least two sub-families on the basis of amino acid sequence similarities within the NAC domain. One sub-family is built around the NAM and CUC2 (cup-shaped cotyledon) proteins whilst the other sub-family contains factors with a NAC domain similar to those of ATAF1 and ATAF2.

[0147] Thus far, little is known about the function of different NAC family members. This is surprising given that there are 113 members in Arabidopsis. However, NAM, CUC1 and CUC2 are thought to have vital roles in the regulation of embryo and flower development. In Petunia, nam mutant embryos fail to develop a shoot apical meristem (SAM) and have fused cotyledons. These mutants sometimes generate escape shoots that produce defective flowers with extra petals and fused organs. In Arabidopsis, the cuc1 and cuc2 mutations have somewhat similar effects, causing defects in SAM formation and the separation of cotyledons, sepals and stamens.

[0148] Although nam and cuc mutants exhibit comparable defects during embryogenesis, the penetrance of these phenotypes is much lower in cuc mutants. Functional redundancy of the CUC genes in Arabidopsis may explain this observation. In terms of the flower phenotype there are notable differences between nam and cuc mutants. Flowers of cuc mutants do not contain additional organs and the formation of sepals and stamens is most strongly affected. In nam mutants, by contrast, the flowers do carry additional organs and petal formation is more markedly affected than that of other floral organs. These apparent differences might be explained in two ways: the NAM and CUC proteins have been recruited into different roles in development of Arabidopsis and Petunia flowers. Alternatively, the proteins could share a common function between the two species, with the different mutant floral phenotypes arising from variations in the way other genes (that participate in the same developmental processes) are affected by defects in NAM or CUC.

[0149] A further gene from this family, NAP (NAC-like activated by AP3/PI) is also involved in flower development and is thought to influence the transition between cell division and cell expansion in stamens and petals. Overall, then, the NAC proteins mainly appear to regulate developmental processes.

[0150] The ZF-HD family, including the G2999 clade. Since their discovery in 1983, the homeobox genes (the name of which derives from the homeotic mutations that affect Drosophila development) have been found in all eukaryotes examined, including yeast, plants, and animals (McGinnis et al. (1984) Nature 308: 428-433; McGinnis et al. (1984) Cell 37: 403-408; Scott et al. (1984) Proc. Natl. Acad. Sci. U.S.A. 81: 4115-4119; Scott et al. (1989) Biochim. Biophys. Acta. 989, 25-48; Shepherd et al. (1984) Nature 310: 70-71; Gehring et al. (1987) Science 236: 1245-1252; Vollbrecht et al. (1991) Nature 350: 241-243; Ruberti et al. (1991) EMBO J. 10: 1787-1791; and Schena and Davis (1992) Genes. Dev. 7, 367-379. The homeobox (HB) is a conserved DNA stretch that encodes an approximate 61 amino acid region termed the homeodomain (HD). It is well demonstrated that homeodomain proteins are transcription factors, and that the homeodomain is responsible for sequence specific recognition and binding of DNA (Affolter et al. (1990) Curr Opin Cell Biol. 2: 485-495; Hayashi and Scott (1990) Cell 63: 883-894, and references therein). Genetic and structural analysis indicate that the homeodomain operates by fitting the most conserved of three alpha helices, helix 3, directly into the major groove of the DNA (Hanes and Brent (1989) Cell 57: 1275-1283; Hanes and Brent (1991) Science 251: 426-430; Kissinger et al. (1990) Cell 63: 579-590; and Wolberger et al. (1991) Cell 67: 517-528). For a general review on the homeobox genes, see Duboule, D. (1994). Guidebook to the Homeobox Genes. Oxford, Oxford University Press.

[0151] Homeobox genes play many important roles in the developmental processes of multicellular animals. In Drosophila, for example, a variety of these genes have functions in embryo development. Initially, they act maternally to establish anterior-posterior polarity. Later, homeobox genes are known to regulate the segmentation process, dorso-ventral differentiation, and control cell fate determination in the eye and nervous system (Scott et al. (1989) supra).

[0152] A large number of homeodomain proteins have now been identified in a range of higher plants (Burglin (1997) Nucleic Acids Res. 25: 4173-4180; Burglin (1998) Dev. Genes Evol. 208: 113-116), which are herein defined as the containing the ‘classical’ type of homeodomain (FIG. 9). These exhibit many differences to animal homeodomain proteins outside the conserved domain, but all contain the signature WFXNX[RK] (X=any amino acid, [RK] indicates either an R or K residue at this position) within the third helix. Data from the Genome Initiative indicate that there are around 90 Arabidopsis classical homeobox genes. These are now being implicated in the control of a wide range of different processes. In many cases, plant homeodomains are found in proteins in combination with additional regulatory motifs such as leucine zippers. Classical plant homeodomain proteins can be broadly categorized into the following different classes based on homologies within the family, and the presence of other types of domain: KNOX class I, KNOX class II, HD-BEL1, HD-ZIP class I, HD-ZIP class II, HD-ZIP class III, HD-ZIP class IV (GL2 like), PHD finger type, and WUSCHEL-like (Freeling and Hake (1985); Genetics 111: 617-634 Vollbrecht et al. (1991) supra; Schindler et al. (1993) Plant J. 4:137-150; Sessa et al. (1994)). In: Puigdomenech P, Coruzzi G, (eds) Molecular genetic analysis of plant development and metabolism, pp. 411-426. Springer Verlag, Berlin; Kerstetter et al. (1994) Plant Cell 6: 1877-1887; Kerstetter et al. (1997) Development 124: 3045-3054; Burglin (1997) supra; Burglin (1998) supra; Schoof et al. (2000) Cell 100: 635-644).

[0153] Recently a novel class of proteins was discovered that contain a domain similar to the classical homeodomain, in combination with N-terminal zinc finger motifs, by Windhovel (Windhovel et al. (2001) Plant Mol. Biol. 45: 201-214), while studying the regulatory mechanisms responsible for the mesophyll specific expression of the C4 phosphoenolpyruvate gene of Flavaria trinervia. Using a yeast one-hybrid screen, these workers recovered five cDNA clones, which encoded proteins that were capable of specifically binding the promoter of the Flavaria C4 phosphoenolpyruvate gene, but not the promoter of a Flavaria C3 phosphoenolpyruvate gene. One-hybrid experiments and in vitro DNA binding studies were then used to confirm that these proteins specifically interact with the proximal region of the C4 phosphoenolpyruvate gene. Four of five clones [FtHB1 (GenBank accession Y18577), FbHB2 (GenBank accession Y18579), FbHB3 (GenBank accession Y18580), and FbHB4 (GenBank accession Y18581), (the fifth clone encoded a histone)] all encoded a novel type of protein that contained two types of highly conserved domains. At the C-termini, a region was apparent that had many of the features of a homeodomain, whereas at the N-termini, two putative zinc finger motifs were present. Yeast two-hybrid experiments were used to show that the zinc finger motifs are sufficient to confer homo and hetero-dimerization between the proteins, and mutagenesis experiments demonstrated that conserved cysteine residues within the motifs are essential for such dimerization. Given the presence of the potential homeodomain and zinc fingers, Windhovel (Windhovel et al. (2001) supra) named this new class of proteins as the ZF-HD group.

[0154] That four proteins of this type were identified in the above studies suggested that the family might have a specific role in establishing expression of the C4 phosphoenolpyruvate gene within mesophyll cells. However, database searches revealed that proteins of this class are also present in C3 species, indicating that they likely have additional roles outside of C4 photosynthesis (Windhovel et al. (2001) supra). In particular, the Arabidopsis genome encodes fourteen proteins of this type, but the functional analysis of these proteins has yet to be publicly reported.

[0155] Secondary structure analyses performed by Windhovel (Windhovel et al. (2001) supra) indicated that the putative homeodomains of the ZF-HD proteins contain three alpha helices similar to those recognized in the classes of homeodomain already found in plants (Duboule (1994) supra). Interestingly, though, if full-length proteins of the ZF-HD group are blasted against databases, they do not preferentially align with the known classes of plant homeodomain proteins. Furthermore, a phylogenetic tree based on comparing the classical versus ZF-HD type homeodomains reveal that the latter occupy a distinct node of the tree (FIG. 10).

[0156] A careful examination of the ZF-HD proteins reveals a particular striking difference to the classical plant homeodomain. All of the 90 or so previously recognized plant homeodomain proteins contain the signature WFXNX[RK] (X=any amino acid) within the third helix. However, the ZF-HD proteins all lack the invariant F residue in this motif and generally contain an M in its place. This structural distinction, combined with the presence of ZF motifs in other regions of the protein, could confer functional properties on ZF-HD proteins that are different to those found in other HD containing proteins.

[0157] The HLH/MYC family, including the G3086 clade. The bHLH protein family is a group of transcription factors found in mammals and plants. The typical feature of this family of transcription factors is that they share a highly conserved approximately 50 amino acid DNA-binding domain. This domain consists of a basic region of 14 amino acids followed by a first helix, a loop region of seven amino acids and a second helix (Littlewood et al. (1994) Prot. Profile 1: 639-709). In plants, members of this family also share, besides the bHLH domain, a highly conserved 200 amino acid N-terminal domain. Functional analysis revealed that small deletions in the N-terminal domain inactivate the B protein, a member of bHLH protein family, in Z. mays (Goff et al. (1992) Genes Dev. 6: 864-875). It has also been shown that the N-terminal domain can interact with one of other transcription factors (Myb proteins) to regulate anthocyanin biosynthesis in Z. mays (Goff et al. (1992) supra).

[0158] In mammalian systems, members of this family have been shown to control development and differentiation of a variety of cell types. The bHLH proteins play essential roles in neurogenesis or neural development, and myogenesis (Littlewood et al. (1994) supra).

[0159] Plant bHLH proteins have been shown to play an important role in the regulation of anthocyanin biosynthesis, in the control of trichome development, in phytochrome signaling transduction pathway, and in the regulation of dehydration- and ABA-inducible gene expression. It has suggested that the R locus of maize is responsible for determining the temporal and spatial pattern of anthocyanin pigmentation in the plant. The R gene family consists of B, S, and Lc genes, which encode a transcription factor of the basic helix-loop-helix class (Goff et al. (1992) supra, Ludwig (1990) Cell 62: 849-851). A gene encoding a basic helix-loop-helix protein has been cloned as a phytochrome-interacting factor in a genetic screen for T-DNA-tagged Arabidopsis mutants as well as in a yeast two-hybrid screen. The protein functions as a positively-acting signaling intermediate (Halliday et al. (1999) Proc. Natl. Acad. Sci. USA. 96:5832-5837, Ni et al. (1998) Cell 95: 657-667). A new mutant, hfrl (long hypocotyl in far-red) has been isolated from Quail's lab. The hfrl mutant exhibits a reduction in seedling responsiveness specifically to continuous far-red light (FRc), thereby suggesting a locus likely to be involved in phytochrome A (phyA) signal transduction. HFR1 encodes a nuclear protein with strong similarity to the bHLH family of DNA-binding proteins but with an atypical basic region. In contrast to PIF3, a related bHLH protein previously shown to bind phyB, HFR1 did not bind either phyA or B. However, HFR1 did bind PIF3, suggesting heterodimerization, and both the HFR1/PIF3 complex and PIF3 homodimer bound preferentially to the Pfr form of both phytochromes. Thus, HFR1 may function to modulate phyA signaling via heterodimerization with PIF3. HFR1 mRNA is 30-fold more abundant in FRc than in continuous red light, suggesting a potential mechanistic basis for the specificity of HFR1 to phyA signaling.

[0160] The rd22BP1 protein of Arabidopsis has a typical DNA-binding domain of a basic region helix-loop-helix motif. It has been shown that transcription of the rd22BP1 gene is induced by dehydration stress and phytohormone ABA treatment, and its induction precedes that of rd22, a dehydration-responsive gene (Abe et al. (1997) Plant Cell 9: 1859-1868).

[0161] Plant bHLH proteins may also play a crucial role in the process of nitrogen fixation, probably not acting as a transcription factor. A protein with a helix-loop-helix motif was identified as a symbiotic ammonium transport protein by functional complementation of the yeast NH4+ transport mutant with a soybean nodule cDNA (Kaiser et al. (1998) Science 1998 281: 1202-1206). Using similar complementation approach of the yeast fet3fet4 mutant strain, an iron transport protein was isolated from an iron-deficient maize root cDNA expression library. The protein had 44% identity with an Arabidopsis bHLH-like protein RAP1 that binds the G-box sequence via a basic region helix-loop-helix (Loulergue (1998) Gene 225:47-57).

[0162] Another bHLH gene has been recently identified as indl by M. Yanofsky's group in UC San Diego. They found that fruit from a knockout mutant do not show dehiscence zone differentiation. In addition, their results suggest that ind1 may mediate cell differentiation during Arabidopsis fruit development. A cytokinin-repressed gene CRR12 with a basic region/helix-loop-helix motif was identified from a cucumber cotyledon cDNA library. It was found that the level of CRR12 transcripts decreased in response to either cytokinins or light in etiolated cotyledons. The mRNA was low in cotyledons and leaves of light-grown plants, but it increased during dark incubation.

[0163] Table 1 shows the polypeptides identified by polypeptide SEQ ID NO and Identifier (e.g., Mendel Gene ID (GID) No., accession number or other name), presented in order of similarity to the first Arabidopsis sequence listed for each set, and includes the conserved domains of the polypeptide in amino acid coordinates, the respective domain sequences, and the extent of identity in percentage terms to the first Arabidopsis sequence listed for each set.

TABLE 1

Gene families and binding domains for exemplary sequences
of the invention, including paralogs and orthologs

| | | | | | | |
|---|---|---|---|---|---|---|
| | | | Conserved | | | |
| | | | Domains in | Conserved | | |
| | | | Polypeptide | Domains in | Conserved | % ID in |
| SEQ ID | | | Amino Acid | Polynucleotide | Domain | conserved |
| NO: | GID | Species | Coordinates | Base Coordinates | Sequence | domain |

| | | | | | | |
|---|---|---|---|---|---|---|
| | | | | | | % ID to |
| | | | | | | G2133 |
| 12 | G2133 | Arabidopsis | AP2: 10-77 | AP2: 53-256 | DQSKYKGIRRRKWGK | 100% |
| | | thaliana | | | WVSEIRVPGTRQRLWL | |
| | | | | | GSFSTAEGAAVAHDVA | |
| | | | | | FYCLHRPSSLDDESFNF | |
| | | | | | PHLL | |
| 94 | G3646 | Brassica | AP2: 10-77 | AP2: 203-406 | HQAKYKGIRRRKWGK | 91% |
| | | oleracea | | | WVSEIRVPATRERLWL | |
| | | | | | GSFSTAEGAAVAHDVA | |
| | | | | | FYCLHRPSSLDNEAFNF | |
| | | | | | PHLL | |
| 92 | G3645 | Brassica rapa | AP2: 10-75 | AP2: 40-237 | TQSKYKGIRRRKWGK | 89% |
| | | subsp. | | | WVSEIRVPGTRDRLWL | |
| | | Pekinensis | | | GSFSTAEGAAVAHDVA | |
| | | | | | FYCLHQPNSLESLNFPH | |
| | | | | | LL | |
| 2 | G47 | Arabidopsis | AP2: 10-75 | AP2: 65-262 | SQSKYKGIRRRKWGK | 88% |
| | | thaliana | | | WVSEIRVPGTRDRLWL | |
| | | | | | GSFSTAEGAAVAHDVA | |
| | | | | | FFCLHQPDSLESLNFPH | |
| | | | | | LL | |
| 88 | G3643 | Glycine max | AP2: 13-78 | AP2: 101-298 | TNNKLKGVRRRKWGK | 69% |
| | | | | | WVSEIRVPGTQERLWL | |
| | | | | | GTYATPEAAAVAHDV | |
| | | | | | AVYCLSRPSSLDKLNFP | |
| | | | | | ETL | |
| 96 | G3647 | Zinnia elegans | AP2: 13-78 | AP2: 53-250 | SQKTYKGVRCRRWGK | 63% |
| | | | | | WVSEIRVPGSRERLWL | |
| | | | | | GTYSTPEGAAVAHDVA | |
| | | | | | SYCLKGNTSFHKLNIPS | |
| | | | | | ML | |
| 90 | G3644 | Oryza sativa | AP2: 52-122 | AP2: 154-366 | ERCRYRGVRRRRWGK | 54% |
| | | (japonica | | | WVSEIRVPGTRERLWL | |
| | | cultivar- | | | GSYATPEAAAVAHDTA | |
| | | group) | | | VYFLRGGAGDGGGGG | |
| | | | | | ATLNFPERA | |
| 98 | G3649 | Oryza sativa | AP2: 15-87 | AP2: 43-26 | EMMRYRGVRRRRRWGK | 53% |
| | | (japonica | | | WVSEIRVPGTRERLWL | |
| | | cultivar- | | | GSYATAEAAAVAHDA | |
| | | group) | | | AVCLLRLGGGRRAAA | |
| | | | | | GGGGGLNFPARA | |
| 100 | G3651 | Oryza sativa | AP2: 60-130 | AP2: 178-390 | ERCRYRGVRRRRW0K | 52% |
| | | (japonica | | | WVSEIRVPGTRERLWL | |
| | | cultivar- | | | GSYATPEAAAVAHDTA | |
| | | group) | | | VYFLRGGAGDGGGGG | |
| | | | | | ATAQLPGAR | |
| | | | | | | % ID to |
| | | | | | | G922 |
| 4 | G922 | Arabidopsis | 1st SCR: 134-199 | 1st SCR: 400-597 | RRLFFEMFPILKVSYLL | 100% |
| | | thaliana | | | TNRAILEAMEGEKMVH | |
| | | | | | VIDLDASEPAQWLALL | |
| | | | | | QAFNSRPEGPPHLRITG | |
| 4 | G922 | Arabidopsis | 2nd SCR: 332- | 2nd SCR: 994- | FLNAIWGLSPKVMVVT | 100% |
| | | thaliana | 401 | 1203 | EQDSDHNGSTLMERLL | |
| | | | | | ESLYTYAALFDCLETK | |
| | | | | | VPRTSQDRIKVEKMLF | |
| | | | | | GEEIKN | |
| 4 | G922 | Arabidopsis | 3rd SCR: 405-478 | 3rd SCR: 1213- | CEGFERRERHEKLEKW | 100% |
| | | thaliana | | 1434 | SQRIDLAGFGNVPLSYY | |
| | | | | | AMLQARRLLQGCGFD | |
| | | | | | GYRIKEESGCAVICWQ | |
| | | | | | DRPLYSVSAW | |
| 220 | G3824 | Lycopersicon | 1st SCR: 42-107 | 1st SCR: 134-331 | RKMFFEIFPFLKVAFVV | 69% |
| | | esculentum | | | TNQAIIEAMEGEKMVH | |
| | | | | | IVDLNAAEPLQWRALL | |
| | | | | | QDLSARPEGPPHLRITG | |
| 220 | G3824 | Lycopersicon | 2nd SCR: 235- | 2nd SCR: 713- | FLNALWGLSPKVMVV | 78% |
| | | esculentum | 304 | 922 | TEQDANHNGTTLMERL | |
| | | | | | SESLHFYAALFDCLEST | |
| | | | | | LPRTSLERLKVEKMLL | |
| | | | | | GEEIRN | |
| 220 | G3824 | Lycopersicon | 3rd SCR: 308-381 | 3rd SCR: 932- | CEGIERKERHEKLEKW | 77% |
| | | esculentum | | 1153 | FQRFDTSGFGNVIPLSY | |
| | | | | | YAMLQARRLLQSYSCE | |
| | | | | | GYKIKEDNGCVVICWQ | |
| | | | | | DRPLFSVSSW | |
| 212 | G3810 | Glycine max | 1st SCR: 106-171 | 1st SCR: 316-513 | QKLFFELFPFLKVAFVL | 68% |
| | | | | | TNQAIIEAMEGEKVIHII | |
| | | | | | DLNAAEAAQWIALLRV | |
| | | | | | LSAHPEGPPHLRITG | |
| 212 | G3810 | Glycine max | 2nd SCR: 305- | 2nd SCR: 913- | FLNALWGLSPKVMVV | 80% |
| | | | 374 | 1122 | TEQDCNHNGPTLMDRL | |
| | | | | | LEALYSYAALFDCLEST | |
| | | | | | VSRTSLERLRVEKMLF | |
| | | | | | GEEIKN | |
| 212 | G3810 | Glycine max | 3rd SCR: 378-451 | 3rd SCR: 1132- | CEGSERKERHEKLEKW | 71% |
| | | | | 1353 | FQRFDLAGFGNVPLSY | |
| | | | | | FGMVQARRFLQSYGCE | |
| | | | | | GYRMRDENGCVLICW | |
| | | | | | EDRPMYSISAW | |
| 214 | G3811 | Glycine max | 1st SCR: 103-168 | 1st SCR: 361-558 | QKLFFELLPFLKFSYILT | 68% |
| | | | | | NQAIVEAMEGEKMVHI | |
| | | | | | VDLYGAGPAQWISLLQ | |
| | | | | | VLSARPEGPPHLRITG | |
| 214 | G3811 | Glycine max | 2nd SCR: 296- | 2nd SCR: 940- | FLNALWGLSPKVMVV | 74% |
| | | | 365 | 1149 | TEQDFNHNCLTMMERL | |
| | | | | | AEALFSYAAYFDCLES | |
| | | | | | TVSRASMDRLKLEKML | |
| | | | | | FGEEIKN | |
| 214 | G3811 | Glycine max | 3rd SCR: 369-442 | 3rd SCR: 1159- | CEGCERKERHEKMDR | 60% |
| | | | | 1380 | WIQRLDLSGFANVPISY | |
| | | | | | YGMLQGRRFLQTYGCE | |
| | | | | | GYKMREECGRVMICW | |
| | | | | | QERSLFSITAW | |
| 218 | G3814 | Oryza sativa | 1st SCR: 123-190 | 1st SCR: 367-570 | RRHMFDVLPFLKLAYL | 60% |
| | | (japonica | | | TTNHAILEAMEGERFV | |
| | | cultivar- | | | HVVDFSGPAANPVQWI | |
| | | group) | | | ALFHAFRGRREGPPHL | |
| | | | | | RITA | |
| 218 | G3814 | Oryza sativa | 2nd SCR: 332- | 2nd SCR: 994- | FLSAVRSLSPKIMVMTE | 48% |
| | | (japonica | 400 | 1200 | QEANHNGGAFQERFDE | |
| | | cultivar- | | | ALNYYASLFDCLQRSA | |
| | | group) | | | AAAAERARVERVLLGE | |
| | | | | | EIRG | |
| 218 | G3814 | Oryza sativa | 3rd SCR: 404-480 | 3rd SCR: 1210- | CEGAERVERHERARQ | 46% |
| | | (japonica | | 1440 | WAARMEAAGMERVGL | |
| | | cultivar- | | | SYSGAMEARKLLQSCG | |
| | | group) | | | WAGPYEVRIHDAGGHG | |
| | | | | | FFFCWHKRPLYAVTAW | |
| 216 | G3813 | Oryza sativa | 1st SCR: 129-194 | 1st SCR: 385-582 | RRHFLDLCPFLRLAGA | 53% |
| | | (japonica | | | AANQSILEAMESEKIVH | |
| | | cultivar- | | | VIDLGGADATQWLELL | |
| | | group) | | | HLLAARPEGPPHLRLTS | |
| 216 | G3813 | Oryza sativa | 2nd SCR: 290- | 2nd SCR: 868- | FLGALWGLSPKVMVV | 61% |
| | | (japonica | 359 | 1077 | AEQEASHNAAGLTERF | |
| | | cultivar- | | | VEALNYYAALFDCLEV | |
| | | group) | | | GAARGSVERARVERW | |
| | | | | | LLGEEIKN | |
| 216 | G3813 | Oryza sativa | 3rd SCR: 363-436 | 3rd SCR: 1087- | CDGGERRERHERLERW | 64% |
| | | (japonica | | 1308 | ARRLEGAGFGRVPLSY | |
| | | cultivar- | | | YALLQARRVAQGLGC | |
| | | group) | | | DGFKVREEKGNFFLCW | |
| | | | | | QDRALFSVSAW | |
| 222 | G3827 | Oryza sativa | 2nd SCR: 226- | 2nd SCR: 676- | DVESLRGLSLKVMVVT | 55% |
| | | (japonica | 295 | 885 | EQEVSHNAAGLTERFV | |
| | | cultivar- | | | EALNYYAALFDCLEVG | |
| | | group) | | | GARGSVERTRVERWLL | |
| | | | | | GEEIKN | |
| 222 | G3827 | Oryza sativa | 3rd SCR: 299-365 | 3rd SCR: 895- | CDGGERRIERHERLEGA | 60% |
| | | (japonica | | 1095 | GFGRVPLSYYALLQAR | |
| | | cultivar- | | | RVAQGLGCDGFKVREE | |
| | | group) | | | KGNFFLCWQDRALFSV | |
| | | | | | SAW | |
| | | | | | | % ID to |
| | | | | | | G1274 |
| 6 | G1274 | Arabidopsis | WRKY: 110-166 | WRKY: 328-498 | DDGFKWRKYGKKSVK | 100% |
| | | thaliana | | | NNINKRNYYKCSSEGC | |
| | | | | | SVKIKRVERDGDDAAY | |
| | | | | | VITTYEGVHNH | |
| 140 | G3724 | Glycine max | WRKY: 107-163 | WRKY: 390-560 | DDGYKWRKYGKKSVK | 84% |
| | | | | | SSPNLRNYYKCSSGGC | |
| | | | | | SVKKRVERDRDDYSYV | |
| | | | | | ITTYEGVHNH | |
| 148 | G3728 | Zea mays | WRKY: 108-164 | WRKY: 1075- | DDGFKWRKYGKKAVK | 82% |
| | | | | 1245 | NSPNPRNYYRCSSEGC | |
| | | | | | GVKKRVERDRDDPRY | |
| | | | | | VITTYDGVHNH | |
| 206 | G3802 | Sorghum | WRKY: 110-166 | WRKY: 386-556 | DDGFKWRKYGKKAVK | 82% |
| | | bicolor | | | NSPNPRNYYRCSSEGC | |
| | | | | | GVKKRVERDRDDPRY | |
| | | | | | VITTYDGVHNH | |
| 210 | G3804 | Zea mays | WRKY: 108-164 | WRKY: 438-608 | DDGFKWRXYGKKAVK | 82% |
| | | | | | NSPNPRNYYRCSSEGC | |
| | | | | | GVKKRVERDRDDPRY | |
| | | | | | VITTYDGVHNH | |
| 146 | G3727 | Zea mays | WRKY: 102-158 | WRKY: 391-561 | DDGFKWRKYGKKAVK | 80% |
| | | | | | SSPNPRNYYRCSSEGCG | |
| | | | | | VKKRVERDRDDPRYVI | |
| | | | | | TTYDGVHNH | |
| 154 | G3731 | Lycopersicon | WRKY: 95-151 | WRKY: 297-467 | DDGFKCRKYGKKMVK | 80% |
| | | esculentum | | | NNPNPRNYYKCSSGGC | |
| | | | | | NVKKRVERDNKDSSY | |
| | | | | | VITTYEGIHNH | |
| 156 | G3732 | Solanum | WRKY: 95-151 | WRKY: 309-479 | DDGFKWRKYGKKMV | 80% |
| | | tuberosum | | | KNSSNPRNYYKCSSGG | |
| | | | | | CNVKKRVERDNEDSSY | |
| | | | | | VITTYEGIHNH | |
| 158 | G3733 | Hordeum | WRKY: 131-187 | WRKY: 641-811 | DDGYKWRKYGKKSVK | 80% |
| | | vulgare | | | NSPNPRNYYRCSTEGC | |
| | | | | | SVKKRVERDRDDPAYV | |
| | | | | | VTTYEGTHSH | |
| 204 | G3797 | Lactuca sativa | WRKY: 118-174 | WRKY: 363-533 | DDGFKWRKYGKKMV | 80% |
| | | | | | KNSPNPRNYYRCSAAG | |
| | | | | | CSVKKRVERDVEDARY | |
| | | | | | VITTYEGIHNH | |
| 208 | G3803 | Glycine max | WRKY: 111-167 | WRKY: 367-537 | DDGYKWRKYGKKTVK | 80% |
| | | | | | NNPNPRNYYKCSGEGC | |
| | | | | | NVKKRVERDRDDSNY | |
| | | | | | VLTTYDGVHNH | |
| 132 | G3720 | Zea mays | WRKY: 135-191 | WRKY: 403-573 | DDGYKWRKYGKKSVK | 78% |
| | | | | | NSPNPRNYYRCSTEGC | |
| | | | | | NVKKRVERDKDDPSY | |
| | | | | | VVTTYEGMHNH | |
| 134 | G3721 | Oryza sativa | WRKY: 96-152 | WRKY: 342-512 | DDGFKWRKYGKKAVK | 78% |
| | | (japonica | | | NSPNPRNYYRCSTEGC | |
| | | cultivar- | | | NVKKRVERDREDHRY | |
| | | group) | | | VITTYDGVHNH | |
| 136 | G3722 | Zea mays | WRKY: 129-185 | WRKY: 430-600 | DDGYKWRKYGKKSVK | 78% |
| | | | | | NSPNPRNYYRCSTEGC | |
| | | | | | NVKKRVERDRDDPRY | |
| | | | | | VVTMYEGVHNH | |
| 144 | G3726 | Oryza sativa | WRKY: 135-191 | WRKY: 459-629 | DDGYKWRKYGKKSVK | 78% |
| | | (japonica | | | NSPNPRNYYRCSTEGC | |
| | | cultivar- | | | NVKKRVERDKDDPSY | |
| | | group) | | | VVTTYEGTHNH | |
| 202 | G3795 | Capsicum | WRKY: 95-151 | WRKY: 302-472 | DDGYKWRKYGKKMV | 78% |
| | | annuum | | | KNSPNPRNYYRCSVEG | |
| | | | | | CPVKKRVERDKEDSRY | |
| | | | | | VITTYEGVHNH | |
| 30 | G1275 | Arabidopsis | WRKY: 113-169 | WRKY: 394-564 | DDGFKWRKYGKKMV | 77% |
| | | thaliana | | | KNSPHPRNYYKCSVDG | |
| | | | | | CPVKKRVERDRDDPSF | |
| | | | | | VITTYEGSHNH | |
| 138 | G3723 | Glycine max | WRKY: 113-169 | WRKY: 715-885 | DDGYKWRKYGKKTVK | 77% |
| | | | | | SSPNPRNYYKCSGEGC | |
| | | | | | DVKKRVERDRDDSNY | |
| | | | | | VLTTYDGVHNH | |
| 152 | G3730 | Oryza sativa | WRKY: 107-163 | WRKY: 385-555 | DDGFKWRKYGKKAVK | 77% |
| | | (japonica | | | SSPNPRNYYRCSAAGC | |
| | | cultivar- | | | GVKIKRVERDGDDPRY | |
| | | group) | | | VVTTYDGVHNH | |
| 130 | G3719 | Zea mays | WRKY: 91-147 | WRKY: 428-598 | DDGFKWRKYGKKAVK | 75% |
| | | | | | SSPNPRNYYRCSTEGSG | |
| | | | | | VKKRVERDSDDPRYVV | |
| | | | | | TTYDGVHNH | |
| 142 | G3725 | Oryza sativa | WRKY: 158-214 | WRKY: 688-858 | DDGYKWRKYGKKSVK | 75% |
| | | (japonica | | | NSPNPRNYYRCSTEGC | |
| | | cultivar- | | | NVKKRVERDKNDPRY | |
| | | group) | | | VVTMYEGIHNH | |
| 150 | G3729 | Oryza sativa | WRKY: 137-193 | WRKY: 452-622 | DDGYRWRKYGKKMV | 75% |
| | | (japonica | | | KNSPNPRNYYRCSSEG | |
| | | cultivar- | | | CRVKKRVERARDDARF | |
| | | group) | | | VVTTYDGVHNH | |
| 32 | G1758 | Arabidopsis | WRKY: 109-165 | WRKY: 393-563 | DDGYKWRKYGKKIPIT | 57% |
| | | thaliana | | | GSPFPRHYHKCSSPDCN | |
| | | | | | VKKKIERDTNNPDYILT | |
| | | | | | TYEGRHNH | |
| | | | | | | % ID to |
| | | | | | | G1792 |
| 8 | G1792 | Arabidopsis | AP2: 16-80 | AP2: 122-316 | KQARIFRGVRiRRPWGK | 100% |
| | | thaliana | | | FAAEIRDPSRNGARLW | |
| | | | | | LGTFETAEEAARAYDR | |
| | | | | | AAFNLRGHLAILNFPNEY | |
| 86 | G3520 | Glycine max | AP2: 14-78 | AP2: 50-244 | EEPRYRGVRRRPWGKF | 80% |
| | | | | | AAEIRDPARHGARVWL | |
| | | | | | GTFLTAEEAARAYDRA | |
| | | | | | AYEMRGALAVLNFPNEY | |
| 82 | G3518 | Glycine max | AP2: 13-77 | AP2: 134-328 | VEVRYRGIRRRPWGKF | 76% |
| | | | | | AAEIRDPTRKGTRIWLG | |
| | | | | | TFDTAEQAARAYDAA | |
| | | | | | AFHFRGHRAILNFPNEY | |
| 84 | G3519 | Glycine max | AP2: 13-77 | AP2: 93-287 | CEVRYRGIRRRPWGKF | 76% |
| | | | | | AAEIRDPTRKGTRIWLG | |
| | | | | | TFDTAEQAARAYDAA | |
| | | | | | AFHFRGHRAILNFPNEY | |
| 160 | G3735 | Medicago | AP2: 23-87 | AP2: 148-342 | DQIKYRGIRRRPWGKF | 76% |
| | | truncatula | | | AAEIRDPTRKGTRIWLG | |
| | | | | | TFDTAEQAARAYDAA | |
| | | | | | AFHFRGHRAILNFPNEY | |
| 34 | G1791 | Arabidopsis | AP2: 10-74 | AP2: 63-257 | NEMKYRGVRKRPWGK | 72% |
| | | thaliana | | | YAAEIRDSARHGARVW | |
| | | | | | LGTFNTAEDAARAYDR | |
| | | | | | AAFGMRGQRAILNFPHEY | |
| 70 | G3380 | Oryza sativa | AP2: 18-82 | AP2: 138-332 | ETTKYRGVRRRPSGKF | 72% |
| | | (japonica | | | AAEIRDSSRQSVRVWL | |
| | | cultivar- | | | GTFDTAEEAARAYDRA | |
| | | group) | | | AYAMRGHLAVLNFPAEA | |
| 74 | G3383 | Oryza sativa | AP2: 9-73 | AP2: 25-219 | TATKYRGVRRRPWGK | 72% |
| | | (japonica | | | FAAEIRDPERGGARVW | |
| | | cultivar- | | | LGTFDTAEEAARAYDR | |
| | | group) | | | AAYAQRGAAAVLNFPAAA | |
| 18 | G30 | Arabidopsis | AP2: 16-80 | AP2: 86-280 | EQGKYRGVRRRPWGK | 70% |
| | | thaliana | | | YAAEIRDSRKHGERVW | |
| | | | | | LGTFDTAEDAARAYDR | |
| | | | | | AAYSMRGKAAILNFPHEY | |
| 72 | G3381 | Oryza sativa | AP2: 14-78 | AP2: 122-316 | LVAKYRGVRRIRPWGK | 70% |
| | | (japonica | | | FAAEIRDSSRHGVRVW | |
| | | cultivar- | | | LGTFDTAEEAARAYDR | |
| | | group) | | | SAYSMRGANAVLNFPADA | |
| 76 | G3515 | Oryza sativa | AP2: 11-75 | AP2: 53-247 | SSSSYRGVRKRPWGKF | 70% |
| | | (japonica | | | AAEIRDPERGGARVWL | |
| | | cultivar- | | | GTFDTAEEAARAYDRA | |
| | | group) | | | AFAMKGATAMLNFPGDH | |
| 78 | G3516 | Zea mays | AP2: 6-70 | AP2: 16-210 | KEGKYRGVRKRPWGK | 70% |
| | | | | | FAAEIRDPERGGSRVW | |
| | | | | | LGTFDTAEEAARAYDR | |
| | | | | | AAFAMKGATAVLNFPASG | |
| 164 | G3737 | Oryza sativa | AP2: 8-72 | AP2: 233-427 | AASKYRGVRRRLPWGK | 70% |
| | | (japonica | | | FAAEIRDPERGGSRVW | |
| | | cultivar- | | | LGTFDTAEEAARAYDR | |
| | | group) | | | AAFAMKGAMAVLNFPGRT | |
| 36 | G1795 | Arabidopsis | AP2: 11-75 | AP2: 57-251 | EHGKYRGVRRRPWGK | 69% |
| | | thaliana | | | YAAEIRDSRKHGERVW | |
| | | | | | LGTFDTAEEAARAYDQ | |
| | | | | | AAYSMRGQAAILNFPHEY | |
| 200 | G3794 | Zea mays | AP2: 6-70 | AP2: 135-329 | EPTKYRGVRRRPSGKF | 69% |
| | | | | | AAEIRDSSRQSVRMWL | |
| | | | | | GTFDTAEEAARAYDRA | |
| | | | | | AYAMRGQIAVLNFPAEA | |
| 80 | G3517 | Zea mays | AP2: 13-77 | AP2: 76-270 | EPTKYRGVRRRPWGK | 67% |
| | | | | | YAAEIRDSSRHGVRIW | |
| | | | | | LGTFDTAEEAARAYDR | |
| | | | | | SANSMRGANAVLNFPEDA | |
| 162 | G3736 | Triticum | AP2: 12-76 | AP2: 163-357 | EPTKYRGVRRRPWGKF | 67% |
| | | aestivum | | | AAEIRDSSRHGVRMWL | |
| | | | | | GTFDTAEEAAAAYDRS | |
| | | | | | AYSMRGRNAVLNFPDRA | |
| 166 | G3739 | Zea mays | AP2: 13-77 | AP2: 211-405 | EPTKYRGVRRRPWGK | 67% |
| | | | | | YAAEIRDSSRIIGVRIW | |
| | | | | | LGTFDTAEEAARAYDR | |
| | | | | | SAYSMRGANAVLNFPEDA | |
| | | | | | | % ID to |
| | | | | | | G2053 |
| 10 | G2053 | Arabidopsis | NAC: 6-152 | NAC: 16-456 | GLRFRPTDKEIVVDYLR | 100% |
| | | thaliana | | | PKNSDRDTSHVDRVIST | |
| | | | | | VTIRSFDPWELPGQSRI | |
| | | | | | KLKDESWGFFSPKENK | |
| | | | | | YGRGDQQIRKTKSGY | |
| | | | | | WKITGKLPKPILRNRQEI | |
| | | | | | GEKKVLMFYMSKELG | |
| | | | | | GSKSDWVMHEYHAFS | |
| | | | | | PTQMMMTYTICKVMFKGD | |
| 20 | G515 | Arabidopsis | NAC: 6-149 | NAC: 93-524 | GLRFGPTDEEIVVDYL | 78% |
| | | thaliana | | | WPKNSDRDTSHVDRFI | |
| | | | | | NTVPVGRLDPWELPGQ | |
| | | | | | SRIKLKDVAWGFFRPK | |
| | | | | | ENKYGRGDQQMRKTK | |
| | | | | | SGFWKSTGRPKPIMRN | |
| | | | | | RQQIGEKKLLMFYTSKE | |
| | | | | | SKSDWVIHEYHGFSHN | |
| | | | | | QMMMTYTLCKVMFNGG | |
| 24 | G517 | Arabidopsis | NAC: 6-153 | NAC: 16-459 | GFRFRLPNDEEIVDHYLR | 62% |
| | | thaliana | | | PKNLDSDTSHVDEVIST | |
| | | | | | VDICSFEPWDLPSKSMI | |
| | | | | | KSRDGVWYFFSVKEM | |
| | | | | | KYNRGDQQRRRTNSGF | |
| | | | | | WKKTGKTMTVMRKRG | |
| | | | | | NREKIGEKRVLVFKNR | |
| | | | | | DGSKTDWVMHEYHAT | |
| | | | | | SLFPNQMMTYTVCKVE | |
| | | | | | FKGE | |
| 22 | G516 | Arabidopsis | NAC: 6-141 | NAC: 16-423 | GFRFRPTDGEIVDIYLR | 55% |
| | | thaliana | | | PKNLESNTSHVDEVIST | |
| | | | | | VDICSFDPWDLPSHSR | |
| | | | | | MKTRDQVWYFFGRKE | |
| | | | | | NKYGKGDRQIRKTKSG | |
| | | | | | FWKKTGVTMDIMRKT | |
| | | | | | GDREKIGEKRVLVFKN | |
| | | | | | HGGSKSDWAMHEYHA | |
| | | | | | TFSSPNQGE | |
| | | | | | | % ID to |
| | | | | | | G2999 |
| 14 | G2999 | Arabidopsis | ZF: 80-133 | ZF: 280-441 | ARYRECQKNHAASSGG | 100% |
| | | thaliana | | | HVVDGCGEFMSSGEEG | |
| | | | | | TVESLLCAACDCHRSF | |
| | | | | | HRKEID | |
| 14 | G2999 | Arabidopsis | HB: 198-261 | HB: 634-825 | KKRFRTKFNEEQKEKM | 100% |
| | | thaliana | | | MEFAEKIGWRMTKLED | |
| | | | | | DEVNRIFCREIKVKRQV | |
| | | | | | FKVWMHNNKQAAKKKD | |
| 62 | G2998 | Arabidopsis | ZF: 74-127 | ZF: 220-381 | VRYREGLKNHAASVG | 79% |
| | | thaliana | | | GSVHDGCGEFMPSGEE | |
| | | | | | GTIEALRCAACDCHRN | |
| | | | | | FHRKEMD | |
| 62 | G2998 | Arabidopsis | HB: 240-303 | HB: 718-909 | KKRFRTKFTTDQKERM | 78% |
| | | thaliana | | | MDFAEKLGWRMNKQD | |
| | | | | | EEELKRFCGEIGVKRQ | |
| | | | | | VFKVWMHNNKNNAKKPP | |
| 64 | G3000 | Arabidopsis | ZF: 58-111 | ZF: 318-479 | AKYRECQKNHAASTG | 77% |
| | | thaliana | | | GHVVDGCCEFMAGGE | |
| | | | | | EGTLGALKCAACNCHR | |
| | | | | | SFHRKEVY | |
| 64 | G3000 | Arabidopsis | HB: 181-244 | HB: 687-878 | KKRVRTKIINEEQKEKM | 65% |
| | | thaliana | | | KEFAERLGWRMQKKD | |
| | | | | | EEEIDKFCRMVNLRRQ | |
| | | | | | VFKVWMHNNKQAMKRNN | |
| 106 | G3670 | Lotus | ZF: 62-115 | ZF: 184-345 | VRYRECQKNHAVSFGG | 74% |
| | | corniculatus | | | HAVDGCCEFMAAGDE | |
| | | var. japonicus | | | GTLEAVICAACNCHRN | |
| | | | | | FHRKEID | |
| 106 | G3670 | Lotus | HB: 207-270 | HB: 619-810 | KKRYRTKFTPEQKEKM | 57% |
| | | corniculatus | | | LAFAEELGWRIQKHQE | |
| | | var. japonicus | | | AAVEQFCAETCVRRNV | |
| | | | | | LKVWMHNNKNTLGKKP | |
| 110 | G3674 | Oryza sativa | ZF: 61-114 | ZF: 274-435 | ARYRECLKNHAVGIGG | 72% |
| | | (indica | | | HAVDGCGEFMASGEE | |
| | | cultivar- | | | GSIDALRCAACGCHRN | |
| | | group) | | | FHRKESE | |
| 110 | G3674 | Oryza sativa | HB: 226-289 | HB: 769-960 | KKRFRTKFTQEQKDKM | 59% |
| | | (indica | | | LAFAERLGWRIQKHDE | |
| | | cultivar- | | | AAVQQFCEEVCVKRH | |
| | | group) | | | VLKVWMHNNKHTLGKKA | |
| 102 | G3663 | Lotus | ZF: 88-141 | ZF: 262-423 | IRYRECLRNHAARLGS | 70% |
| | | corniculatus | | | HVTDGCGEFMPNGEQ | |
| | | var. japonicus | | | GTPESLICAACECHRNF | |
| | | | | | HRKEAQ | |
| 102 | G3663 | Lotus | HB: 219-282 | HB: 655-846 | KKRFRTKFTQQQKDR | 64% |
| | | corniculatus | | | MMEFAEKLGWKIQKQ | |
| | | var. japonicus | | | DEEEVKQFCSHVGVKR | |
| | | | | | QAFKVWMHNSKQAMKKKQ | |
| 108 | G3671 | Oryza sativa | ZF: 40-93 | ZF: 233-394 | GRYRECLKNHAVGIGG | 70% |
| | | (japonica | | | HAVDGCGEFMAAGEE | |
| | | cultivar- | | | GTIDALRCAACNCHRN | |
| | | group) | | | FHRKESE | |
| 108 | G3671 | Oryza sativa | HB: 200-263 | HB: 713-904 | KKRFRTKFTQEQKDKM | 59% |
| | | (japonica | | | LAFAERVGWRIQKLHDE | |
| | | cultivar- | | | AAVQQFCDEVGVKRH | |
| | | group) | | | VLKVWMHNNKHTLGKKL | |
| 60 | G2997 | Arabidopsis | ZF: 47-100 | ZF: 263-424 | IRYRECLKNHAVNIGG | 68% |
| | | thaliana | | | HAVDGCCEFMPSGEDG | |
| | | | | | TLDALKCAACGCHRNF | |
| | | | | | HRKETE | |
| 60 | G2997 | Arabidopsis | HB: 157-220 | HB: 593-784 | TKRERTKFTAEQKEKM | 59% |
| | | thaliana | | | LAFAERLGWRIQKHDD | |
| | | | | | VAVEQFCAETGVRRQV | |
| | | | | | LKIWMHNNKNSLGKKP | |
| 116 | G3683 | Oryza sativa | ZF: 72-125 | ZF: 214-375 | ARYRECLKLNHAAAIGG | 68% |
| | | (japonica | | | SATDGCGEFMPGGEEG | |
| | | cultivar- | | | SLDALRCSACGCHRNF | |
| | | group) | | | HRKELD | |
| 116 | G3683 | Oryza sativa | HB: 193-256 | HB: 577-768 | RKRFRTKFTAEQKARM | 59% |
| | | (japonica | | | LGFAEEVGWRLQKLED | |
| | | cultivar- | | | AVVQRFCQEVGVKRR | |
| | | group) | | | VLKVWMHNNKHTLARRH | |
| 112 | G3675 | Brassica | ZF: 49-102 | ZF: 201-362 | VRYRECLKNHAVNIGG | 66% |
| | | napus | | | HAVDGCCEFMIPSGEDG | |
| | | | | | SLDALKCAACGCHRNF | |
| | | | | | HRKETE | |
| 112 | G3675 | Brassica | HB: 162-225 | HB: 540-731 | AKRFRTKFTAEQKDKM | 56% |
| | | napus | | | LAFAERLGWRIQKHDD | |
| | | | | | AAVEQFCAETGVRRQV | |
| | | | | | LKIWMHNNKNSLGRKP | |
| 122 | G3690 | Oryza sativa | ZF: 161-213 | ZF:481-639 | WRYRECLKNHAARMG | 66% |
| | | (japonica | | | AHVLDGCGEFMSSPGD | |
| | | cultivar- | | | GAAALACAACGCHRSF | |
| | | group) | | | HRREPA | |
| 122 | G3690 | Oryza sativa | HB: 318-381 | HB: 952-1143 | KKRFRTKFTAEQKERM | 56% |
| | | (japonica | | | REFAHRVGWRIHKPDA | |
| | | cultivar- | | | AAVDAFCAQVGVSRR | |
| | | group) | | | VLKVWMHNNKHLAKTPP | |
| 104 | G3668 | Flaveria | ZF: 42-95 | ZF: 410-571 | YRYKECLKNHAVGIGG | 64% |
| | | bidentis | | | QAVDGCGEFMAAGDE | |
| | | | | | GTLDALKCAACNCHR | |
| | | | | | NFHRKEVE | |
| 104 | G3668 | Flaveria | HB: 174-237 | HB: 806-997 | KKRFRTKFTQDQKDR | 54% |
| | | bidentis | | | MLAFSEALGWRIQKHD | |
| | | | | | EAAVQQFCNETGVKRH | |
| | | | | | VLKVWMHNNKHTIGKKP | |
| 58 | G2996 | Arabidopsis | ZF: 73-126 | ZF: 241-402 | FRFRECLKNQAVNIGG | 64% |
| | | thaliana | | | HAVDGCGEFMPAGIEG | |
| | | | | | TIDALKCAACGCHRNF | |
| | | | | | HRKELP | |
| 58 | G2996 | Arabidopsis | HB: 191-254 | HB: 595-786 | RKRHRTKFTAEQKERM | 53% |
| | | thaliana | | | LALAERIGWRIQRQDD | |
| | | | | | EVIQRFCQETGVPRQVL | |
| | | | | | KVWLHNNKHTLGKSP | |
| 54 | G2994 | Arabidopsis | ZF: 88-141 | ZF: 329-490 | IKYKECLKNHAAAMG | 62% |
| | | thaliana | | | GNATDGCGEFMPSGED | |
| | | | | | GSIEALTCSACNCHRNF | |
| | | | | | HRKEVE | |
| 54 | G2994 | Arabidopsis | HB: 218-281 | HB: 719-910 | KKRFRTKFTPEQKEKM | 65% |
| | | thaliana | | | LSFAEKVGWKIQRQED | |
| | | | | | CVVQRFCEEIGVKRRV | |
| | | | | | LKVWMHNNKIHFSKKN | |
| 120 | G3686 | Oryza sativa | ZF: 38-88 | ZF: 112-264 | CRYHECLRNHAAASGG | 62% |
| | | (indica | | | HVVDGCGEFMPASTEE | |
| | | cultivar- | | | PLACAACGCHRSFHRR | |
| | | group) | | | DPS | |
| 120 | G3686 | Oryza sativa | HB: 159-222 | HB: 475-666 | RRRSRTTFTREQKEQM | 50% |
| | | (indica | | | LAFAERVGWRIQRQEE | |
| | | cultivar- | | | ATVEHFCAQVGVRRQ | |
| | | group) | | | ALKVWMHNNKHSFKQKQ | |
| 52 | G2993 | Arabidopsis | ZF: 85-138 | ZF: 442-603 | IKYKECLKNHAATMGG | 61% |
| | | thaliana | | | NAIDGCGEFMPSGEEG | |
| | | | | | SIEALTCSVCNCHRNFH | |
| | | | | | RRETE | |
| 52 | G2993 | Arabidopsis | HB: 222-285 | HB: 853-1044 | KKRFRTKFTQEQKEKM | 57% |
| | | thaliana | | | ISFAERVGWKIQRQEES | |
| | | | | | VVQQLCQEIGIRRRVLK | |
| | | | | | VWMHNNKQNLSKKS | |
| 48 | G2991 | Arabidopsis | ZF: 54-109 | ZF: 218-385 | ATYKECLKNHAAGIGG | 60% |
| | | thaliana | | | HALDGCGEFMPSPSFN | |
| | | | | | SNDPASLTCAACGCHR | |
| | | | | | NFHRREED | |
| 48 | G2991 | Arabidopsis | HB: 179-242 | HB: 593-784 | RKRFRTKFSQYQKEKM | 59% |
| | | thaliana | | | FEFSERVGWRMPKADD | |
| | | | | | VVVKEFCREIGVDKSV | |
| | | | | | FKVWMHNNKISGRSGA | |
| 114 | G3680 | Zea mays | ZF: 34-89 | ZF: 223-390 | PLYRECLKNHAASLGG | 60% |
| | | | | | HAVDGCGEFMPSPGAN | |
| | | | | | PADPTSLKCAACGCHR | |
| | | | | | NFHRRTLE | |
| 114 | G3680 | Zea mays | HB: 222-285 | HB: 787-978 | RKRFRTKLFTAEQKQRM | 50% |
| | | | | | QELSERLGWRLQKRDE | |
| | | | | | AIVDEWCRDIGVGKGV | |
| | | | | | FKVWMHNNKHNFLGGH | |
| 118 | G3685 | Oryza sativa | ZF: 43-95 | ZF: 216-374 | VRYHECLRNHAAAMG | 59% |
| | | (japonica | | | GHVVDGCREFMPMPG | |
| | | cultivar- | | | DAADALKCAACGCHR | |
| | | group) | | | SFHRKDDG | |
| 118 | G3685 | Oryza sativa | HB: 172-235 | HB: 603-794 | RKRFRTKFTPEQKEQM | 56% |
| | | (japonica | | | LAFAERVGWRMQKQD | |
| | | cultivar- | | | EALVEQFCAQVGVRRQ | |
| | | group) | | | VFKVWMHNNKSSIGSSS | |
| 44 | G2989 | Arabidopsis | ZF: 50-105 | ZF: 208-375 | VTYKECLKNHAAAIGG | 58% |
| | | thaliana | | | HALDGCGEFMPSPSSTP | |
| | | | | | SDPTSLKCAACGCHRN | |
| | | | | | FHRRETD | |
| 44 | G2989 | Arabidopsis | HB: 192-255 | HB: 634-825 | RKRFRTKFSSNQKEKM | 59% |
| | | thaliana | | | HEFADRIGWKIQKRDE | |
| | | | | | DEVRDFCREIGVDKGV | |
| | | | | | LKVWMHNNKNSFKFSG | |
| 46 | G2990 | Arabidopsis | ZF: 54-109 | ZF: 206-373 | FTYKECLKNHAAALGG | 57% |
| | | thaliana | | | HALDGCGEFMPSPSSIS | |
| | | | | | SDPTSLKCAACGCHRN | |
| | | | | | FHRRDPD | |
| 46 | G2990 | Arabidopsis | HB: 200-263 | HB: 644-835 | RKRFRTKFSQFQKEKM | 57% |
| | | thaliana | | | HEFAERVGWKMQKRD | |
| | | | | | EDDVRDFCRQIGVDKS | |
| | | | | | VLKVWMHNNKNTFNRRD | |
| 66 | G3001 | Arabidopsis | ZF: 62-113 | ZF: 222-377 | PHYYECRKNHAADIGT | 57% |
| | | thaliana | | | TAYDGCGEFVSSTGEE | |
| | | | | | DSLNCAACGCHRNFHR | |
| | | | | | EELI | |
| 66 | G3001 | Arabidopsis | HB: 179-242 | HB: 573-764 | VKRLKTKFTAEQTEKM | 42% |
| | | thaliana | | | RDYAEKLRWKVRPER | |
| | | | | | QEEVEEFCVEIGVNRK | |
| | | | | | NFRIWMNNHKDKIIIDE | |
| 50 | G2992 | Arabidopsis | ZF: 29-84 | ZF: 85-252 | VCYKECLKNHAANLG | 55% |
| | | thaliana | | | GHALDGCGEFMPSPTA | |
| | | | | | TSTDPSSLRCAACGCH | |
| | | | | | RNFHRRDPS | |
| 50 | G2992 | Arabidopsis | HB: 156-219 | HB: 466-657 | RKRTRTKFTPEQKIKM | 48% |
| | | thaliana | | | RAFAEKAGWKINGCDE | |
| | | | | | KSVREFCNEVGIERGVL | |
| | | | | | KVWMHNNKYSLLNGK | |
| 128 | G3695 | Oryza sativa | ZF: 22-71 | ZF: 64-213 | GKYKECMRNHAAAMG | 51% |
| | | (japonica | | | GQAFDGCGEYMPASPD | |
| | | cultivar- | | | SLKCAACGCHRSFHRR | |
| | | group) | | | AAA | |
| 128 | G3695 | Oryza sativa | HB: 164-227 | HB: 490-681 | RKRFRTKFTPEQKERM | 57% |
| | | (japonica | | | REFAEKQGWRINRNDD | |
| | | cultivar- | | | GALDRFCVEIGVKRHV | |
| | | group) | | | LKVWMHNHKNQLASSP | |
| 56 | G2995 | Arabidopsis | ZF: 3-58 | ZF: 143-310 | VLYNECLKNHAVSLGG | 50% |
| | | thaliana | | | HALDGCGEFTPKSTTIL | |
| | | | | | TDPPSLRCDACGCHRN | |
| | | | | | FHRRSPS | |
| 56 | G2995 | Arabidopsis | HB: 115-178 | HB: 479-670 | KKHKRTKFTAEQKVK | 45% |
| | | thaliana | | | MRGFAERAGWKINGW | |
| | | | | | DEKWVREFCSEVGIER | |
| | | | | | KVLKVWIHNNKYFNN | |
| | | | | | GRS | |
| 124 | G3692 | Oryza sativa | ZF: 10-61 | ZF: 28-183 | EVYRECMRNHAAKLG | 48% |
| | | (japonica | | | TYANDGCCEYTPDDGH | |
| | | cultivar- | | | PAGLLCAACGCHRNFH | |
| | | group) | | | RKDFL | |
| 124 | G3692 | Oryza sativa | HB: 119-188 | HB: 355-564 | RRRTRTKFTEEQKARM | 58% |
| | | (japonica | | | LRFAERLGWRMPKREP | |
| | | cultivar- | | | GRAPGDDEVARFCREI | |
| | | group) | | | GVNRQVFKVWMHNH | |
| | | | | | KAGGGGGG | |
| 126 | G3694 | Oryza sativa | ZF: 1-40 | ZF: 1-120 | MGAHVLDGCGEFMSSP | 48% |
| | | (japonica | | | GDGAAALACAACGCH | |
| | | cultivar- | | | RSFHRREPA | |
| | | group) | | | | |
| 126 | G3694 | Oryza sativa | HB: 145-208 | HB: 433-624 | KKRFRTKFTAEQKERM | 56% |
| | | (japonica | | | REFAHRVGWRIHKPDA | |
| | | cultivar- | | | AAVDAFCAQVGVSRR | |
| | | group) | | | VLKVWMHNNKLLAKTPP | |
| 68 | G3002 | Arabidopsis | ZF: 5-53 | ZF: 81-227 | CVYRECMRNHAAKLG | 42% |
| | | thaliana | | | SYAIDGCREYSQPSTGD | |
| | | | | | LCVACGCHRSYHRRIDV | |
| 68 | G3002 | Arabidopsis | HB: 106-168 | HB: 384-572 | QRRRKSKFTAEQREAM | 35% |
| | | thaliana | | | KDYAAKLGWTLKDKR | |
| | | | | | ALREEIRVFCEGIGVTR | |
| | | | | | YHFKTWVNNNKXFYH | |
| | | | | | | % ID to |
| | | | | | | G3086 |
| 16 | G3086 | Arabidopsis | HLH/MYC: 307- | HLH/MYC: | KRGCATHPRSIAERVR | 100% |
| | | thaliana | 365 | 1059-1235 | RTKISERMRKLQDLVP | |
| | | | | | NMDTQTNTADMLDLA | |
| | | | | | VQYIKDLQEQVK | |
| 188 | G3767 | Glycine max | HLH/MYC: 146- | HLH/MYC: 436- | KRGCATHPRSIAERVR | 93% |
| | | | 204 | 612 | RTKISERMRKLQDLVP | |
| | | | | | NMDKQTNTADMLDLA | |
| | | | | | VDYIKDLQKQVQ | |
| 190 | G3768 | Glycine max | HLH/MYC: 190- | HLH/MYC: 568- | KRGCATHPRSIAERVR | 93% |
| | | | 248 | 744 | RTKISERMRKLQDLVP | |
| | | | | | NMDKQTNTADMLDLA | |
| | | | | | VDYIKDLQKQVQ | |
| 192 | G3769 | Glycine max | HLH/MYC: 240- | HLH/MYC: 718- | KRGCATHPRSIAERVR | 93% |
| | | | 298 | 894 | RTKISERMRKLQDLVP | |
| | | | | | NMDKQTNTADMLDLA | |
| | | | | | VEYIKDLQNQVQ | |
| 174 | G3744 | Oryza sativa | HLH/MYC: 71- | HLH/MYC: 211- | KRGCATHPRSIAERVR | 89% |
| | | (japonica | 129 | 387 | RTRISERIRKLQELVPN | |
| | | cultivar- | | | MDKQTNTADMLDLAV | |
| | | group) | | | DYIKDLQKQVK | |
| 178 | G3755 | Zea mays | HLH/MYC: 97- | HLH/MYC: 289- | KRGCATHPRSIAERVR | 89% |
| | | | 155 | 465 | RTKISERJRKLQELVPN | |
| | | | | | MDKQTNTSDMLDLAV | |
| | | | | | DYIKDLQKQVK | |
| 26 | G592 | Arabidopsis | HLH/MYC: 282- | HLH/MYC: 964- | KRGCATHPRSIAERVR | 88% |
| | | thaliana | 340 | 1140 | RTRISERMRKLQELVPN | |
| | | | | | MDKQTNTSDMLDLAV | |
| | | | | | DYIKDLQRQYK | |
| 186 | G3766 | Glycine max | HLH/MYC: 35- | HLH/MYC: 103- | KRGCATHPRSIAERVR | 88% |
| | | | 93 | 279 | RTRLISERMRKLQELVPH | |
| | | | | | MDKQTNTADMLDLAV | |
| | | | | | EYIKDLQKQFK | |
| 172 | G3742 | Oryza sativa | HLH/MYC: 199- | HLH/MYC: 595- | KRGCATHPRSLAERVR | 86% |
| | | (japonica | 257 | 771 | RTRISERIRKLQELVPN | |
| | | cultivar- | | | MEKQTNTADMLDLAV | |
| | | group) | | | DYIKELQKQVK | |
| 198 | G3782 | Pinus taeda | HLH/MYC: 471- | HLH/MYC: | KRGCATHPRSIAERVR | 80% |
| | | | 530 | 1411-1590 | RTRISERMRKLQELVPN | |
| | | | | | SDKQTVNIADMLDEAV | |
| | | | | | EYVKSLQKQVQ | |
| 176 | G3746 | Oryza sativa | HLH/MYC: 312- | HLH/MYC: 934- | KRGCATHPRSIAERERR | 79% |
| | | (japonica | 370 | 1110 | TRISKRILKKLQDLVPN | |
| | | cultivar- | | | MDKQTNTSDMLDIAVT | |
| | | group) | | | YIKELQGQVE | |
| 184 | G3765 | Glycine max | HLH/MYC: 147- | HLH/MYC: 439- | KRGFATHPRSIAERVRR | 79% |
| | | | 205 | 615 | TRISERIRKLQELVPTM | |
| | | | | | DKQTSTAEMLDLALDY | |
| | | | | | IKDLQKQFK | |
| 194 | G3771 | Glycine max | HLH/MYC: 84- | HLH/MYC: 250- | KRGCATHPRSIAERVR | 79% |
| | | | 142 | 426 | RTRISDRIRKLQELVPN | |
| | | | | | MDKQTNTADMLDEAV | |
| | | | | | AYVKFLQKQIE | |
| 28 | G1134 | Arabidopsis | HLH/MYC: 187- | HLH/MYC: 619- | KRGCATHPRSIAERVR | 77% |
| | | thaliana | 245 | 795 | RTRISDRIRKLQELVPN | |
| | | | | | MDKQTNTADMLEEAV | |
| | | | | | EYVKVLQRQIQ | |
| 168 | G3740 | Oryza sativa | HLH/MYC: 141- | HLH/MYC: 421- | KRGCATHPRSIAERERR | 77% |
| | | (japonica | 199 | 597 | TRISEKLRKLQELVPNM | |
| | | cultivar- | | | DKQTSTADMLDLAVE | |
| | | group) | | | HIKGLQSQLQ | |
| 180 | G3763 | Glycine max | HLH/MYC: 161- | HLH/MYC: 481- | KRGFATHPRSIAERERR | 77% |
| | | | 219 | 657 | TRISARIKKLQDLFPKS | |
| | | | | | DKQTSTADMLDLAVE | |
| | | | | | YIKDLQKQVK | |
| 182 | G3764 | Glycine max | HLH/MYC: 370- | HLH/MYC: | KRGFATHPRSIAERVRR | 77% |
| | | | 428 | 1108-1284 | TRISERIKKLQDLFPKSE | |
| | | | | | KQTSTADMLDLAVEYI | |
| | | | | | KDLQQKVK | |
| 196 | G3772 | Glycine max | HLH/MYC: 211- | HLH/MYC: 631- | KRGCATHPRSIAERERR | 77% |
| | | | 269 | 807 | TRISGKLKKLQDLVPN | |
| | | | | | MDKQTSYADMLDLAV | |
| | | | | | QHIKGLQTQVQ | |
| 40 | G2555 | Arabidopsis | HLH/MYC: 184- | HLH/MYC: 726- | KRGCATHPRSIAERVR | 76% |
| | | thaliana | 242 | 902 | RTRISDRIRRLQELVPN | |
| | | | | | MDKQTNTADMLEEAV | |
| | | | | | EYVKALQSQIQ | |
| 170 | G3741 | Oryza sativa | HLH/MYC: 288- | HLH/MYC: 862- | KRGCATHPRSIAERERR | 76% |
| | | (japonica | 346 | 1038 | TRISEKLRKLQALVPN | |
| | | cultivar- | | | MDKQTSTSDMLDLAV | |
| | | group) | | | DHIKGLQSQLQ | |
| 38 | G2149 | Arabidopsis | HLH/MYC: 286- | HLH/MYC: 927- | KRGCATHPRSIAERERR | 74% |
| | | thaliana | 344 | 1103 | TRISGKLKKLQDLVPN | |
| | | | | | MDKQTSYSDMLDLAV | |
| | | | | | QHIKGLQHQLQ | |
| 42 | G2766 | Arabidopsis | HLH/MYC: 234- | HLH/MYC: 778- | KRGFATHPRSIAERERR | 72% |
| | | thaliana | 292 | 954 | TRISGKLKKLQELVPN | |
| | | | | | MDKQTSYADMLDLAV | |
| | | | | | EHIKGLQHQVE | |

[0164] Table 2 shows a number of polypeptides of the invention not listed in Table 1, identified by SEQ ID NO; Identifier (e.g., Gene ID (GID) No); the transcription factor family to which the polypeptide belongs, and conserved domains of the polypeptide. The first column shows the polypeptide SEQ ID NO; the third column shows the transcription factor family to which the polynucleotide belongs; and the fourth column shows the amino acid residue positions of the conserved domain in amino acid (AA) coordinates.

TABLE 2
Gene families and conserved domains

| Polypeptide | | | Conserved Domains in |
|---|---|---|---|
| SEQ ID NO: | Identifier | Family | Amino Acid Coordinates |
| 224 | G175 | WRKY | 178-234, 372-428 |
| 226 | G303 | HLH/MYC | 92-161 |
| 228 | G354 | Z-C2H2 | 42-62, 88-109 |
| 230 | G489 | CAAT | 57-156 |
| 232 | G634 | TH | 62-147, 189-245 |
| 234 | G682 | MYB-related | 27-63 |
| 236 | G916 | WRKY | 293-349 |
| 238 | G975 | AP2 | 4-71 |
| 240 | G1069 | AT-hook | 67-74 |
| 242 | G1452 | NAC | 55-196 |
| 244 | G1820 | CAAT | 70-133 |
| 246 | G2701 | MYB-related | 33-81, 129-183 |
| 248 | G2789 | AT-hook | 53-73, 121-165 |
| 250 | G2839 | Z-C2H2 | 34-60, 85-113 |
| 252 | G2854 | ACBF-like | 110-250 |
| 254 | G3083 | bZIP-ZW2 | 75-105, 188-215 |
| 256 | G184 | WRKY | 295-352 |
| 258 | G186 | WRKY | 312-369 |
| 260 | G353 | Z-C2H2 | 41-61, 84-104 |
| 262 | G512 | NAC | 24-166 |
| 264 | G596 | AT-hook | 89-96 |
| 266 | G714 | CAAT | 58-148 |
| 268 | G877 | WRKY | 272-328, 487-603 |
| 270 | G1357 | NAC | 17-158 |
| 272 | G1387 | AP2 | 4-71 |
| 274 | G1634 | MYB-related | 129-180 |
| 276 | G1889 | Z-C2H2 | 80-100 |
| 278 | G1940 | ACBF-like | 156-228 |
| 280 | G1974 | Z-C2H2 | 32-60, 72-116 |
| 282 | G2153 | AT-hook | 75-94, 162-206 |
| 284 | G2583 | AP2 | 4-71 |
| 288 | G226 | MYB-related | 28-78 |
| 290 | G481 | CAAT | 20-109 |
| 292 | G482 | CAAT | 25-116 |
| 294 | G485 | CAAT | 21-116 |
| 296 | G486 | CAAT | 5-66 |
| 298 | G1067 | AT-hook | 86-92, 94-247 |
| 300 | G1070 | AT-hook | 98-120 |
| 302 | G1073 | AT-hook | 34-40, 42-187 |
| 304 | G1075 | AT-hook | 78-85 |
| 306 | G1076 | AT-hook | 82-89 |
| 308 | G1248 | CAAT | 46-155 |
| 310 | G1364 | CAAT | 29-118 |
| 312 | G1781 | CAAT | 35-130 |
| 314 | G1816 | MYB-related | 31-81 |
| 316 | G1945 | AT-hook | 49-71 |
| 318 | G2155 | AT-hook | 18-38 |
| 320 | G2156 | AT-hook | 72-78, 80-232 |
| 322 | G2345 | CAAT | 26-152 |
| 324 | G2657 | AT-hook | 116-129 |
| 326 | G2718 | MYB-related | 21-76 |
| 328 | G3392 | MYB-related | 21-72 |
| 330 | G3393 | MYB-related | 20-71 |
| 332 | G3394 | CAAT | 37-126 |
| 334 | G3395 | CAAT | 19-108 |
| 336 | G3396 | CAAT | 21-110 |
| 338 | G3397 | CAAT | 23-112 |
| 340 | G3398 | CAAT | 21-110 |
| 342 | G3399 | AT-hook | 99-105, 107-253 |
| 344 | G3400 | AT-hook | 83-89, 91-237 |
| 346 | G3401 | AT-hook | 35-41, 43-186 |
| 348 | G3403 | AT-hook | 58-64, 66-207 |
| 350 | G3404 | AT-hook | 111-117, 119-263 |
| 352 | G3405 | AT-hook | 97-103, 105-248 |
| 354 | G3406 | AT-hook | 82-88, 90-232 |
| 356 | G3407 | AT-hook | 63-69, 71-220 |
| 358 | G3408 | AT-hook | 83-89, 91-247 |
| 360 | G3429 | CAAT | 35-124 |
| 362 | G3431 | MYB-related | 20-71 |
| 364 | G3434 | CAAT | 18-107 |
| 366 | G3435 | CAAT | 22-111 |
| 368 | G3436 | CAAT | 20-109 |
| 370 | G3437 | CAAT | 54-143 |
| 372 | G3444 | MYB-related | 20-71 |
| 374 | G3445 | MYB-related | 15-65 |
| 376 | G3446 | MYB-related | 16-66 |
| 378 | G3447 | MYB-related | 16-66 |
| 380 | G3448 | MYB-related | 15-66 |
| 382 | G3449 | MYB-related | 15-66 |
| 384 | G3450 | MYB-related | 9-60 |
| 386 | G3456 | AT-hook | 44-50, 52-195 |
| 388 | G3458 | AT-hook | 56-62, 64-207 |
| 390 | G3459 | AT-hook | 77-83, 85-228 |
| 392 | G3460 | AT-hook | 74-80, 82-225 |
| 394 | G3462 | AT-hook | 82-88, 90-237 |
| 396 | G3470 | CAAT | 27-116 |
| 398 | G3471 | CAAT | 26-115 |
| 400 | G3472 | CAAT | 25-114 |
| 402 | G3473 | CAAT | 23-113 |
| 404 | G3474 | CAAT | 25-114 |
| 406 | G3475 | CAAT | 23-112 |
| 408 | G3476 | CAAT | 26-115 |
| 410 | G3477 | CAAT | 27-116 |
| 412 | G3478 | CAAT | 23-112 |
| 414 | G3556 | AT-hook | 45-51, 53-196 |
| 416 | G3835 | CAAT | 4-92 |
| 418 | G3836 | CAAT | 34-122 |
| 420 | G3837 | CAAT | 35-123 |

Producing Polypeptides

[0165] The polynucleotides of the invention include sequences that encode transcription factors and transcription factor homolog polypeptides and sequences complementary thereto, as well as unique fragments of coding sequence, or sequence complementary thereto. Such polynucleotides can be, for example. DNA or RNA, the latter including mRNA, cRNA, synthetic RNA, genomic DNA, cDNA synthetic DNA, oligonucleotides, etc. The polynucleotides are either double-stranded or single-stranded, and include either, or both sense (i.e., coding) sequences and antisense (i.e., non-coding, complementary) sequences. The polynucleotides include the coding sequence of a transcription factor, or transcription factor homolog polypeptide, in isolation, in combination with additional coding sequences (e.g., a purification tag, a localization signal, as a fusion-protein, as a pre-protein, or the like), in combination with non-coding sequences (for example, introns or inteins, regulatory elements such as promoters, enhancers, terminators, and the like), and/or in a vector or host environment in which the polynucleotide encoding a transcription factor or transcription factor homolog polypeptide is an endogenous or exogenous gene.

[0166] A variety of methods exist for producing the polynucleotides of the invention. Procedures for identifying and isolating DNA clones are well known to those of skill in the art, and are described in, for example, Berger and Kimmel, Guide to Molecular Cloning Techniques, Methods in Enzymology, vol. 152 Academic Press, Inc., San Diego, Calif. (“Berger”); Sambrook et al. Molecular Cloning—A Laboratory Manual (2nd Ed.), Vol. 1-3, Cold Spring Harbor Laboratory, Cold Spring Harbor, N.Y., 1989 (“Sambrook”) and Current Protocols in Molecular Biology, Ausubel et al. eds., Current Protocols, a joint venture between Greene Publishing Associates, Inc. and John Wiley & Sons, Inc., (supplemented through 2000) (“Ausubel”).

[0167] Alternatively, polynucleotides of the invention, can be produced by a variety of in vitro amplification methods adapted to the present invention by appropriate selection of specific or degenerate primers. Examples of protocols sufficient to direct persons of skill through in vitro amplification methods, including the polymerase chain reaction (PCR) the ligase chain reaction (LCR), Qbeta-replicase amplification and other RNA polymerase mediated techniques (for example, NASBA), e.g., for the production of the homologous nucleic acids of the invention are found in Berger (supra), Sambrook (supra), and Ausubel (supra), as well as Mullis et al. (1987) PCR Protocols A Guide to Methods and Applications (Innis et al. eds) Academic Press Inc. San Diego, Calif. (1990) (Innis). Improved methods for cloning in vitro amplified nucleic acids are described in Wallace et al. U.S. Pat. No. 5,426,039. Improved methods for amplifying large nucleic acids by PCR are summarized in Cheng et al. (1994) Nature 369: 684-685 and the references cited therein, in which PCR amplicons of up to 40 kb are generated. One of skill will appreciate that essentially any RNA can be converted into a double stranded DNA suitable for restriction digestion, PCR expansion and sequencing using reverse transcriptase and a polymerase. See, e.g., Ausubel, Sambrook and Berger, all supra.

[0168] Alternatively, polynucleotides and oligonucleotides of the invention can be assembled from fragments produced by solid-phase synthesis methods. Typically, fragments of up to approximately 100 bases are individually synthesized and then enzymatically or chemically ligated to produce a desired sequence, e.g., a polynucleotide encoding all or part of a transcription factor. For example, chemical synthesis using the phosphoramidite method is described, e.g., by Beaucage et al. (1981) Tetrahedron Letters 22: 1859-1869; and Matthes et al. (1984) EMBO J. 3: 801-805. According to such methods, oligonucleotides are synthesized, purified, annealed to their complementary strand, ligated and then optionally cloned into suitable vectors. And if so desired, the polynucleotides and polypeptides of the invention can be custom ordered from any of a number of commercial suppliers.

Homologous Sequences

[0169] Sequences homologous, i.e., that share significant sequence identity or similarity, to those provided in the Sequence Listing, derived from Arabidopsis thaliana or from other plants of choice, are also an aspect of the invention. Homologous sequences can be derived from any plant including monocots and dicots and in particular agriculturally important plant species, including but not limited to, crops such as soybean, wheat, corn (maize), potato, cotton, rice, rape, oilseed rape (including canola), sunflower, alfalfa, clover, sugarcane, and turf; or fruits and vegetables, such as banana, blackberry, blueberry, strawberry, and raspberry, cantaloupe, carrot, cauliflower, coffee, cucumber, eggplant, grapes, honeydew, lettuce, mango, melon, onion, papaya, peas, peppers, pineapple, pumpkin, spinach, squash, sweet corn, tobacco, tomato, tomatillo, watermelon, rosaceous fruits (such as apple, peach, pear, cherry and plum) and vegetable brassicas (such as broccoli, cabbage, cauliflower, Brussels sprouts, and kohlrabi). Other crops, including fruits and vegetables, whose phenotype can be changed and which comprise homologous sequences include barley; rye; millet; sorghum; currant; avocado; citrus fruits such as oranges, lemons, grapefruit and tangerines, artichoke, cherries; nuts such as the walnut and peanut; endive; leek; roots such as arrowroot, beet, cassava, turnip, radish, yam, and sweet potato; and beans. The homologous sequences may also be derived from woody species, such pine, poplar and eucalyptus, or mint or other labiates. In addition, homologous sequences may be derived from plants that are evolutionarily related to crop plants, but which may not have yet been used as crop plants. Examples include deadly nightshade (Atropa belladona), related to tomato; jimson weed (Datura strommium), related to peyote; and teosinte (Zea species), related to corn (maize).

Orthologs and Paralogs

[0170] Homologous sequences as described above can comprise orthologous or paralogous sequences. Several different methods are known by those of skill in the art for identifying and defining these functionally homologous sequences. Three general methods for defining orthologs and paralogs are described; an ortholog, paralog or homolog may be identified by one or more of the methods described below.

[0171] Orthologs and paralogs are evolutionarily related genes that have similar sequence and similar functions. Orthologs are structurally related genes in different species that are derived by a speciation event. Paralogs are structurally related genes within a single species that are derived by a duplication event.

[0172] Within a single plant species, gene duplication may cause two copies of a particular gene, giving rise to two or more genes with similar sequence and often similar function known as paralogs. A paralog is therefore a similar gene formed by duplication within the same species. Paralogs typically cluster together or in the same clade (a group of similar genes) when a gene family phylogeny is analyzed using programs such as CLUSTAL (Thompson et al. (1994) Nucleic Acids Res. 22: 4673-4680; Higgins et al. (1996) Methods Enzymol. 266: 383-402). Groups of similar genes can also be identified with pair-wise BLAST analysis (Feng and Doolittle (1987) J. Mol. Evol. 25: 351-360). For example, a clade of very similar MADS domain transcription factors from Arabidopsis all share a common function in flowering time (Ratcliffe et al. (2001) Plant Physiol. 126: 122-132), and a group of very similar AP2 domain transcription factors from Arabidopsis are involved in tolerance of plants to freezing (Gilmour et al. (1998) Plant J. 16: 433442). Analysis of groups of similar genes with similar function that fall within one clade can yield sub-sequences that are particular to the clade. These sub-sequences, known as consensus sequences, can not only be used to define the sequences within each clade, but define the functions of these genes; genes within a clade may contain paralogous sequences, or orthologous sequences that share the same function (see also, for example, Mount (2001), in Bioinformatics: Sequence and Genome Analysis Cold Spring Harbor Laboratory Press, Cold Spring Harbor, N.Y., page 543.)

[0173] Speciation, the production of new species from a parental species, can also give rise to two or more genes with similar sequence and similar function. These genes, termed orthologs, often have an identical function within their host plants and are often interchangeable between species without losing function. Because plants have common ancestors, many genes in any plant species will have a corresponding orthologous gene in another plant species. Once a phylogenic tree for a gene family of one species has been constructed using a program such as CLUSTAL (Thompson et al. (1994) Nucleic Acids Res. 22: 4673-4680; Higgins et al. (1996) supra) potential orthologous sequences can be placed into the phylogenetic tree and their relationship to genes from the species of interest can be determined. Orthologous sequences can also be identified by a reciprocal BLAST strategy. Once an orthologous sequence has been identified, the function of the ortholog can be deduced from the identified function of the reference sequence.

[0174] Transcription factor gene sequences are conserved across diverse eukaryotic species lines (Goodrich et al. (1993) Cell 75: 519-530; Lin et al. (1991) Nature 353: 569-571; Sadowski et al. (1988) Nature 335: 563-564). Plants are no exception to this observation; diverse plant species possess transcription factors that have similar sequences and functions.

[0175] Orthologous genes from different organisms have highly conserved functions, and very often essentially identical functions (Lee et al. (2002) Genome Res. 12: 493-502; Remm et al. (2001) J. Mol. Biol. 314: 1041-1052). Paralogous genes, which have diverged through gene duplication, may retain similar functions of the encoded proteins. In such cases, paralogs can be used interchangeably with respect to certain embodiments of the instant invention (for example, transgenic expression of a coding sequence). An example of such highly related paralogs is the CBF family, with four well-defined members in Arabidopsis (SEQ ID NOs: 422, 424, 426, and GenBank accession number AB015478) and at least one ortholog in Brassica napus, (SEQ ID NO: 428), all of which control pathways involved in both freezing and drought stress (Gilmour et al. (1998) Plant J. 16: 433-442; Jaglo et al. (1998) Plant Physiol. 127: 910-917).

[0176] The following references represent a small sampling of the many studies that demonstrate that conserved transcription factor genes from diverse species are likely to function similarly (i.e., regulate similar target sequences and control the same traits), and that transcription factors may be transformed into diverse species to confer or improve traits.

[0177] (1) The Arabidopsis NPR1 gene regulates systemic acquired resistance (SAR) (Cao et al. (1997) Cell 88: 57-63); over-expression of NPR1 leads to enhanced resistance in Arabidopsis. When either Arabidopsis NPR1 or the rice NPR1 ortholog was overexpressed in rice (which, as a monocot, is diverse from Arabidopsis), challenge with the rice bacterial blight pathogen Xanthomonas oryzae pv. Oryzae, the transgenic plants displayed enhanced resistance (Chem et al. (2001) Plant J. 27: 101-113). NPR1 acts through activation of expression of transcription factor genes, such as TGA2 (Fan and Dong (2002) Plant Cell 14: 1377-1389).

[0178] (2) E2F genes are involved in transcription of plant genes for proliferating cell nuclear antigen (PCNA). Plant E2Fs share a high degree of similarity in amino acid sequence between monocots and dicots, and are even similar to the conserved domains of the animal E2Fs. Such conservation indicates a functional similarity between plant and animal E2Fs. E2F transcription factors that regulate meristem development act through common cis-elements, and regulate related (PCNA) genes (Kosugi and Ohashi, (2002) Plant J. 29: 45-59).

[0179] (3) The ABI5 gene (ABA insensitive 5) encodes a basic leucine zipper factor required for ABA response in the seed and vegetative tissues. Co-transformation experiments with ABI5 cDNA constructs in rice protoplasts resulted in specific transactivation of the ABA-inducible wheat, Arabidopsis, bean, and barley promoters. These results demonstrate that sequentially similar ABI5 transcription factors are key targets of a conserved ABA signaling pathway in diverse plants. (Gampala et al. (2001) J. Biol. Chem. 277: 1689-1694).

[0180] (4) Sequences of three Arabidopsis GAMYB-like genes were obtained on the basis of sequence similarity to GAMYB genes from barley, rice, and L. temulentum. These three Arabadopsis genes were determined to encode transcription factors (AtMYB33, AtMYB65, and AtMYB101) and could substitute for a barley GAMYB and control alpha-amylase expression (Gocal et al. (2001) Plant Physiol. 127: 1682-1693).

[0181] (5) The floral control gene LEAFY from Arabidopsis can dramatically accelerate flowering in numerous dictoyledonous plants. Constitutive expression of Arabidopsis LEAFY also caused early flowering in transgenic rice (a monocot), with a heading date that was 26-34 days earlier than that of wild-type plants. These observations indicate that floral regulatory genes from Arabidopsis are useful tools for heading date improvement in cereal crops (He et al. (2000) Transgenic Res. 9: 223-227).

[0182] (6) Bioactive gibberellins (GAs) are essential endogenous regulators of plant growth. GA signaling tends to be conserved across the plant kingdom. GA signaling is, mediated via GAI, a nuclear member of the GRAS family of plant transcription factors. Arabidopsis GAI has been shown to function in rice to inhibit gibberellin response pathways (Fu et al. (2001) Plant Cell 13: 1791-1802).

[0183] (7) The Arabidopsis gene SUPERMAN (SUP), encodes a putative transcription factor that maintains the boundary between stamens and carpels. By over-expressing Arabidopsis SUP in rice, the effect of the gene's presence on whorl boundaries was shown to be conserved. This demonstrated that SUP is a conserved regulator of floral whorl boundaries and affects cell proliferation (Nandi et al. (2000) Curr. Biol. 10: 215-218).

[0184] (8) Maize, petunia and Arabidopsis myb transcription factors that regulate flavonoid biosynthesis are very genetically similar and affect the same trait in their native species, therefore sequence and function of these myb transcription factors correlate with each other in these diverse species (Borevitz et al. (2000) Plant Cell 12: 2383-2394).

[0185] (9) Wheat reduced height-1 (Rht-B1/Rht-D1) and maize dwarf-8 (d8) genes are orthologs of the Arabidopsis gibberellin insensitive (GAM) gene. Both of these genes have been used to produce dwarf grain varieties that have improved grain yield. These genes encode proteins that resemble nuclear transcription factors and contain an SH2-like domain, indicating that phosphotyrosine may participate in gibberellin signaling. Transgenic rice plants containing a mutant GAI allele from Arabidopsis have been shown to produce reduced responses to gibberellin and are dwarfed, indicating that mutant GAI orthologs could be used to increase yield in a wide range of crop species (Peng et al. (1999) Nature 400: 256-261).

[0186] Transcription factors that are homologous to the listed sequences will typically share at least about 70% amino acid sequence identity in the AP2 domain. More closely related transcription factors can share at least about 79% or about 90% or about 95% or about 98% or more sequence identity with the listed sequences, or with the listed sequences but excluding or outside a known consensus sequence or consensus DNA-binding site, or with the listed sequences excluding one or all conserved domains. Factors that are most closely related to the listed sequences share, e.g., at least about 85%, about 90% or about 95% or more % sequence identity to the listed sequences, or to the listed sequences but excluding or outside a known consensus sequence or consensus DNA-binding site or outside one or all conserved domain. At the nucleotide level, the sequences will typically share at least about 40% nucleotide sequence identity, preferably at least about 50%, about 60%, about 70% or about 80% sequence identity, and more preferably about 85%, about 90%, about 95% or about 97% or more sequence identity to one or more of the listed sequences, or to a listed sequence but excluding or outside a known consensus sequence or consensus DNA-binding site, or outside one or all conserved domain. The degeneracy of the genetic code enables major variations in the nucleotide sequence of a polynucleotide while maintaining the amino acid sequence of the encoded protein. AP2 domains within the AP2 transcription factor family may exhibit a higher degree of sequence homology, such as at least 70% amino acid sequence identity including conservative substitutions, and preferably at least 80% sequence identity, and more preferably at least 85%, or at least about 86%, or at least about 87%, or at least about 88%, or at least about 90%, or at least about 95%, or at least about 98% sequence identity. Transcription factors that are homologous to the listed sequences should share at least 30%, or at least about 60%, or at least about 75%, or at least about 80%, or at least about 90%, or at least about 95% amino acid sequence identity over the entire length of the polypeptide or the homolog.

[0187] Percent identity. can be determined electronically, e.g., by using the MEGALIGN program (DNASTAR, Inc. Madison, Wis.). The MEGALIGN program can create alignments between two or more sequences according to different methods, for example, the clustal method. (See, for example, Higgins and Sharp (1988) Gene 73: 237-244.) The clustal algorithm groups sequences into clusters by examining the distances between all pairs. The clusters are aligned pairwise and then in groups. Other alignment algorithms or programs may be used, including FASTA, BLAST, or ENTREZ, FASTA and BLAST, and which may be used to calculate percent similarity. These are available as a part of the GCG sequence analysis package (University of Wisconsin, Madison, Wis.), and can be used with or without default settings. ENTREZ is available through the National Center for Biotechnology Information. In one embodiment, the percent identity of two sequences can be determined by the GCG program with a gap weight of 1, e.g., each amino acid gap is weighted as if it were a single amino acid or nucleotide mismatch between the two sequences (see U.S. Pat. No. 6,262,333).

[0188] Other techniques for alignment are described in Methods in Enzymology, vol. 266, Computer Methods for Macromolecular Sequence Analysis (1996), ed. Doolittle, Academic Press, Inc., San Diego, Calif., USA. Preferably, an alignment program that permits gaps in the sequence is utilized to align the sequences. The Smith-Waterman is one type of algorithm that permits gaps in sequence alignments (see Shpaer (1997) Methods Mol. Biol. 70: 173-187). Also, the GAP program using the Needleman and Wunsch alignment method can be utilized to align sequences. An alternative search strategy uses MPSRCH software, which runs on a MASPAR computer. MPSRCH uses a Smith-Waterman algorithm to score sequences on a massively parallel computer. This approach improves ability to pick up distantly related matches, and is especially tolerant of small gaps and nucleotide sequence errors. Nucleic acid-encoded amino acid sequences can be used to search both protein and DNA databases.

[0189] The percentage similarity between two polypeptide sequences, e.g., sequence A and sequence B, is calculated by dividing the length of sequence A, minus the number of gap residues in sequence A, minus the number of gap residues in sequence B, into the sum of the residue matches between sequence A and sequence B, times one hundred. Gaps of low or of no similarity between the two amino acid sequences are not included in determining percentage similarity. Percent identity between polynucleotide sequences can also be counted or calculated by other methods known in the art, e.g., the Jotun Hein method. (See, e.g., Hein (1990) Methods Enzymol. 183: 626-645.) Identity between sequences can also be determined by other methods known in the art, e.g., by varying hybridization conditions (see U.S. patent application No. 20010010913).

[0190] Thus, the invention provides methods for identifying a sequence similar or paralogous or orthologous or homologous to one or more polynucleotides as noted herein, or one or more target polypeptides encoded by the polynucleotides, or otherwise noted herein and may include linking or associating a given plant phenotype or gene function with a sequence. In the methods, a sequence database is provided (locally or across an internet or intranet) and a query is made against the sequence database using the relevant sequences herein and associated plant phenotypes or gene functions.

[0191] In addition, one or more polynucleotide sequences or one or more polypeptides encoded by the polynucleotide sequences may be used to search against a BLOCKS (Bairoch et al. (1997) Nucleic Acids Res. 25: 217-221), PFAM, and other databases which contain previously identified and annotated motifs, sequences and gene functions. Methods that search for primary sequence patterns with secondary structure gap penalties (Smith et al. (1992) Protein Engineering 5: 35-51) as well as algorithms such as Basic Local Alignment Search Tool (BLAST; Altschul (1993) J. Mol. Evol. 36: 290-300; Altschul et al. (1990) supra), BLOCKS (Henikoff and Henikoff (1991) Nucleic Acids Res. 19: 6565-6572), Hidden Markov Models (HMM; Eddy (1996) Curr. Opin. Str. Biol. 6: 361-365; Sonnhammer et al. (1997) Proteins 28: 405-420), and the like, can be used to manipulate and analyze polynucleotide and polypeptide sequences encoded by polynucleotides. These databases, algorithms and other methods are well known in the art and are described in Ausubel et al. (1997; Short Protocols in Molecular Biology, John Wiley & Sons, New York, N.Y., unit 7.7) and in Meyers (1995; Molecular Biology and Biotechnology, Wiley VCH, New York, N.Y., p 856-853).

[0192] A further method for identifying or confirming that specific homologous sequences control the same function is by comparison of the transcript profile(s) obtained upon overexpression or knockout of two or more related transcription factors. Since transcript profiles are diagnostic for specific cellular states, one skilled in the art will appreciate that genes that have a highly similar transcript profile (e.g., with greater than 50% regulated transcripts in common, more preferably with greater than 70% regulated transcripts in common, most preferably with greater than 90% regulated transcripts in common) will have highly similar functions. Fowler et al. (2002, Plant Cell, 14: 1675-79) have shown that three paralogous AP2 family genes (CBF1, CBF2 and CBF3), each of which is induced upon cold treatment, and each of which can condition improved freezing tolerance, have highly similar transcript profiles. Once a transcription factor has been shown to provide a specific function, its transcript profile becomes a diagnostic tool to determine whether putative paralogs or orthologs have the same function.

[0193] Furthermore, methods using manual alignment of sequences similar or homologous to one or more polynucleotide sequences or one or more polypeptides encoded by the polynucleotide sequences may be used to identify regions of similarity and AP2 binding domains. Such manual methods are well-known of those of skill in the art and can include, for example, comparisons of tertiary structure between a polypeptide sequence encoded by a polynucleotide which comprises a known function with a polypeptide sequence encoded by a polynucleotide sequence which has a function not yet determined. Such examples of tertiary structure may comprise predicted alpha helices, beta-sheets, amphipathic helices, leucine zipper motifs, zinc finger motifs, proline-rich regions, cysteine repeat motifs, and the like.

[0194] Orthologs and paralogs of presently disclosed transcription factors may be cloned using compositions provided by the present invention according to methods well known in the art. cDNAs can be cloned using mRNA from a plant cell or tissue that expresses one of the present transcription factors. Appropriate mRNA sources may be identified by interrogating Northern blots with probes designed from the present transcription factor sequences, after which a library is prepared from the mRNA obtained from a positive cell or tissue. Transcription factor-encoding cDNA is then isolated using, for example, PCR, using primers designed from a presently disclosed transcription factor gene sequence, or by probing with a partial or complete cDNA or with one or more sets of degenerate probes based on the disclosed sequences. The cDNA library may be used to transform plant cells. Expression of the cDNAs of interest is detected using, for example, methods disclosed herein such as microarrays, Northern blots, quantitative PCR, or any other technique for monitoring changes in expression. Genomic clones may be isolated using similar techniques to those.

Identifying Polynucleotides or Nucleic Acids by Hybridization

[0195] Polynucleotides homologous to the sequences illustrated in the Sequence Listing and tables can be identified, e.g., by hybridization to each other under stringent or under highly stringent conditions. Single stranded polynucleotides hybridize when they associate based on a variety of well characterized physical-chemical forces, such as hydrogen bonding, solvent exclusion, base stacking and the like. The stringency of a hybridization reflects the degree of sequence identity of the nucleic acids involved, such that the higher the stringency, the more similar are the two polynucleotide strands. Stringency is influenced by a variety of factors, including temperature, salt concentration and composition, organic and non-organic additives, solvents, etc. present in both the hybridization and wash solutions and incubations (and number thereof), as described in more detail in the references cited above.

[0196] Stability of DNA duplexes is affected by such factors as base composition, length, and degree of base pair mismatch. Hybridization conditions may be adjusted to allow DNAs of different sequence relatedness to hybridize. The melting temperature (Tₘ) is defined as the temperature when 50% of the duplex molecules have dissociated into their constituent single strands. The melting temperature of a perfectly matched duplex, where the hybridization buffer contains formamide as a denaturing agent, may be estimated by the following equations:

(I) DNA-DNA:
Tₘ(° C.)=81.5+16.6(log [Na+])+0.41(% G+C)−0.62(% formamide)−500/L
(II) DNA-RNA:
Tₘ(° C.)=79.8+18.5(log [Na+])+0.58(% G+C)+0.12(% G+C)²−0.35(% formamide)−820/L
(III) RNA-RNA:
Tₘ(° C.)=79.8+18.5(log [Na+])+0.58(% G+C)+0.12(% G+C)²−0.35(% formamide)−820/L

[0197] where L is the length of the duplex formed, [Na+] is the molar concentration of the sodium ion in the hybridization or washing solution, and % G+C is the percentage of (guanine+cytosine) bases in the hybrid. For imperfectly matched hybrids, approximately 1° C. is required to reduce the melting temperature for each 1% mismatch.

[0198] Hybridization experiments are generally conducted in a buffer of pH between 6.8 to 7.4, although the rate of hybridization is nearly independent of pH at ionic strengths likely to be used in the hybridization buffer (Anderson et al. (1985) supra). In addition, one or more of the following may be used to reduce non-specific hybridization: sonicated salmon sperm DNA or another non-complementary DNA, bovine serum albumin, sodium pyrophosphate, sodium dodecylsulfate (SDS), polyvinyl-pyrrolidone, ficoll and Denhardt's solution. Dextran sulfate and polyethylene glycol 6000 act to exclude DNA from solution, thus raising the effective probe DNA concentration and the hybridization signal within a given unit of time. In some instances, conditions of even greater stringency may be desirable or required to reduce non-specific and/or background hybridization. These conditions may be created with the use of higher temperature, lower ionic strength and higher concentration of a denaturing agent such as formamide.

[0199] Stringency conditions can be adjusted to screen for moderately similar fragments such as homologous sequences from distantly related organisms, or to highly similar fragments such as genes that duplicate functional enzymes from closely related organisms. The stringency can be adjusted either during the hybridization step or in the post-hybridization washes. Salt concentration, formamide concentration, hybridization temperature and probe lengths are variables that can be used to alter stringency (as described by the formula above). As a general guidelines high stringency is typically performed at Tₘ−5° C. to Tₘ−20° C., moderate stringency at Tₘ−20° C. to Tₘ−35° C. and low stringency at Tₘ−35° C. to Tₘ−50° C. for duplex >150 base pairs. Hybridization may be performed at low to moderate stringency (25-50° C. below Tₘ), followed by post-hybridization washes at increasing stringencies. Maximum rates of hybridization in solution are determined empirically to occur at Tₘ−25° C. for DNA-DNA duplex and Tₘ−15° C. for RNA-DNA duplex. Optionally, the degree of dissociation may be assessed after each wash step to determine the need for subsequent, higher stringency wash steps.

[0200] High stringency conditions may be used to select for nucleic acid sequences with high degrees of identity to the disclosed sequences. An example of stringent hybridization conditions obtained in a filter-based method such as a Southern or northern blot for hybridization of complementary nucleic acids that have more than 100 complementary residues is about 5° C. to 20° C. lower than the thermal melting point (Tₘ) for the specific sequence at a defined ionic strength and pH. Conditions used for hybridization may include about 0.02 M to about 0.15 M sodium chloride, about 0.5% to about 5% casein, about 0.02% SDS or about 0.1% N-laurylsarcosine, about 0.001 M to about 0.03 M sodium citrate, at hybridization temperatures between about 50° C. and about 70° C. More preferably, high stringency conditions are about 0.02 M sodium chloride, about 0.5% casein, about 0.02% SDS, about 0.001 M sodium citrate, at a temperature of about 50° C. Nucleic acid molecules that hybridize under stringent conditions will typically hybridize to a probe based on either the entire DNA molecule or selected portions, e.g., to a unique subsequence, of the DNA.

[0201] Stringent salt concentration will ordinarily be less than about 750 mM NaCl and 75 mM trisodium citrate. Increasingly stringent conditions may be obtained with less than about 500 mM NaCl and 50 mM trisodium citrate, to even greater stringency with less than about 250 mM NaCl and 25 mM trisodium citrate. Low stringency hybridization can be obtained in the absence of organic solvent, e.g., formamide, whereas high stringency hybridization may be obtained in the presence of at least about 35% formamide, and more preferably at least about 50% formamide. Stringent temperature conditions will ordinarily include temperatures of at least about 30° C., more preferably of at least about 37° C., and most preferably of at least about 42° C. with formamide present. Varying additional parameters, such as hybridization time, the concentration of detergent, e.g., sodium dodecyl sulfate (SDS) and ionic strength, are well known to those skilled in the art. Various levels of stringency are accomplished by combining these various conditions as needed.

[0202] The washing steps that follow hybridization may also vary in stringency; the post-hybridization wash steps primarily determine hybridization specificity, with the most critical factors being temperature and the ionic strength of the final wash solution. Wash stringency can be increased by decreasing salt concentration or by increasing temperature. Stringent salt concentration for the wash steps will preferably be less than about 30 mM NaCl and 3 mM trisodium citrate, and most preferably less than about 15 mM NaCl and 1.5 mM trisodium citrate.

[0203] Thus, hybridization and wash conditions that may be used to bind and remove polynucleotides with less than the desired homology to the nucleic acid sequences or their complements that encode the present transcription factors include, for example:

[0204] 6×SSC at 65° C.;

[0205] 50% formamide, 4×SSC at 42° C.; or

[0206] 0.5×SSC, 0.1% SDS at 65° C.;

[0207] with, for example, two wash steps of 10-30 minutes each. Useful variations on these conditions will be readily apparent to those skilled in the art.

[0208] A person of skill in the art would not expect substantial variation among polynucleotide species encompassed within the scope of the present invention because the highly stringent conditions set forth in the above formulae yield structurally similar polynucleotides.

[0209] If desired, one may employ wash steps of even greater stringency, including about 0.2×SSC, 0.1% SDS at 65° C. and washing twice, each wash step being about 30 min, or about 0.1×SSC, 0.1% SDS at 65° C. and washing twice for 30 min. The temperature for the wash solutions will ordinarily be at least about 25° C., and for greater stringency at least about 42° C. Hybridization stringency may be increased further by using the same conditions as in the hybridization steps, with the wash temperature raised about 3° C. to about 5° C., and stringency may be increased even further by using the same conditions except the wash temperature is raised about 6° C. to about 9° C. For identification of less closely related homologs, wash steps may be performed at a lower temperature, e.g., 50° C.

[0210] An example of a low stringency wash step employs a solution and conditions of at least 25° C. in 30 mM NaCl, 3 mM trisodium citrate, and 0.1% SDS over 30 min. Greater stringency may be obtained at 42° C. in 15 mM NaCl, with 1.5 mM trisodium citrate, and 0.1% SDS over 30 min. Even higher stringency wash conditions are obtained at 65° C. −68° C. in a solution of 15 mM NaCl, 1.5 mM trisodium citrate, and 0.1% SDS. Wash procedures will generally employ at least two final wash steps. Additional variations on these conditions will be readily apparent to those skilled in the art (see, for example, U.S. patent application No. 20010010913).

[0211] Stringency conditions can be selected such that an oligonucleotide that is perfectly complementary to the coding oligonucleotide hybridizes to the coding oligonucleotide with at least about a 5-10× higher signal to noise ratio than the ratio for hybridization of the perfectly complementary oligonucleotide to a nucleic acid encoding a transcription factor known as of the filing date of the application. It may be desirable to select conditions for a particular assay such that a higher signal to noise ratio, that is, about 15× or more, is obtained. Accordingly, a subject nucleic acid will hybridize to a unique coding oligonucleotide with at least a 2× or greater signal to noise ratio as compared to hybridization of the coding oligonucleotide to a nucleic acid encoding known polypeptide. The particular signal will depend on the label used in the relevant assay, e.g., a fluorescent label, a colorimetric label, a radioactive label, or the like. Labeled hybridization or PCR probes for detecting related polynucleotide sequences may be produced by oligolabeling, nick translation, end-labeling, or PCR amplification using a labeled nucleotide.

[0212] Encompassed by the invention are polynucleotide sequences that are capable of hybridizing to the claimed polynucleotide sequences, for example, to those shown in SEQ ID NO: 1, 11, 87, 89, 91, 93, 95, 97, and 99, and fragments thereof under various conditions of stringency. (See, e.g., Wahl and Berger (1987) Methods Enzymol. 152: 399-407; Kimmel (1987) Methods Enzymol. 152: 507-511). Estimates of homology are provided by either DNA-DNA or DNA-RNA hybridization under conditions of stringency as is well understood by those skilled in the art (Hames and Higgins, Eds. (1985) Nucleic Acid Hybridisation, IRL Press, Oxford, U.K.). Stringency conditions can be adjusted to screen for moderately similar fragments, such as homologous sequences from distantly related organisms, to highly similar fragments, such as genes that duplicate functional enzymes from closely related organisms. Post-hybridization washes determine stringency conditions.

Identifying Polynucleotides or Nucleic Acids with Expression Libraries

[0213] In addition to hybridization methods, transcription factor homolog polypeptides can be obtained by screening an expression library using antibodies specific for one or more transcription factors. With the provision herein of the disclosed transcription factor, and transcription factor homolog nucleic acid sequences, the encoded polypeptide(s) can be expressed and purified in a heterologous expression system (e.g., E. coli) and used to raise antibodies (monoclonal or polyclonal) specific for the polypeptide(s) in question. Antibodies can also be raised against synthetic peptides derived from transcription factor, or transcription factor homolog, amino acid sequences. Methods of raising antibodies are well known in the art and are described in Harlow and Lane (1988), Antibodies: A Laboratory Manual, Cold Spring Harbor Laboratory, New York. Such antibodies can then be used to screen an expression library produced from the plant from which it is desired to clone additional transcription factor homologs, using the methods described above. The selected cDNAs can be confirmed by sequencing and enzymatic activity.

Sequence Variations

[0214] It will readily be appreciated by those of skill in the art, that any of a variety of polynucleotide sequences are capable of encoding the transcription factors and transcription factor homolog polypeptides of the invention. Due to the degeneracy of the genetic code, many different polynucleotides can encode identical and/or substantially similar polypeptides in addition to those sequences illustrated in the Sequence Listing. Nucleic acids having a sequence that differs from the sequences shown in the Sequence Listing, or complementary sequences, that encode functionally equivalent peptides (i.e., peptides having some degree of equivalent or similar biological activity) but differ in sequence from the sequence shown in the Sequence Listing due to degeneracy in the genetic code, are also within the scope of the invention.

[0215] Altered polynucleotide sequences encoding polypeptides include those sequences with deletions, insertions, or substitutions of different nucleotides, resulting in a polynucleotide encoding a polypeptide with at least one functional characteristic of the instant polypeptides. Included within this definition are polymorphisms which may or may not be readily detectable using a particular oligonucleotide probe of the polynucleotide encoding the instant polypeptides, and improper or unexpected hybridization to allelic variants, with a locus other than the normal chromosomal locus for the polynucleotide sequence encoding the instant polypeptides.

[0216] Allelic variant refers to any of two or more alternative forms of a gene occupying the same chromosomal locus. Allelic variation arises naturally through mutation, and may result in phenotypic polymorphism within populations. Gene mutations can be silent (i.e., no change in the encoded polypeptide) or may encode polypeptides having altered amino acid sequence. The term allelic variant is also used herein to denote a protein encoded by an allelic variant of a gene. Splice variant refers to alternative forms of RNA transcribed from a gene. Splice variation arises naturally through use of alternative splicing sites within a transcribed RNA molecule, or less commonly between separately transcribed RNA molecules, and may result in several mRNAs transcribed from the same gene. Splice variants may encode polypeptides having altered amino acid sequence. The term splice variant is also used herein to denote a protein encoded by a splice variant of an mRNA transcribed from a gene.

[0217] Those skilled in the art would recognize that, for example, G2133, SEQ ID NO: 12, represents a single transcription factor; allelic variation and alternative splicing may be expected to occur. Allelic variants of SEQ ID NO: 11 can be cloned by probing cDNA or genomic libraries from different individual organisms according to standard procedures. Allelic variants of the DNA sequence shown in SEQ ID NO: 11, including those containing silent mutations and those in which mutations result in amino acid sequence changes, are within the scope of the present invention, as are proteins which are allelic variants of SEQ ID NO: 12. cDNAs generated from alternatively spliced mRNAs, which retain the properties of the transcription factor are included within the scope of the present invention, as are polypeptides encoded by such cDNAs and mRNAs. Allelic variants and splice variants of these sequences can be cloned by probing cDNA or genomic libraries from different individual organisms or tissues according to standard procedures known in the art (see U.S. Pat. No. 6,388,064).

[0218] Thus, in addition to the sequences set forth in the Sequence Listing, the invention also encompasses related nucleic acid molecules that include allelic or splice variants of the sequences of the invention, for example, SEQ ID NO: 1, 11, 87, 89, 91, 93, 95, 97, and 99, and include sequences which are complementary to any of the above nucleotide sequences. Related nucleic acid molecules also include nucleotide sequences encoding a polypeptide comprising or consisting essentially of a substitution, modification, addition and/or deletion of one or more amino acid residues compared to the polypeptide sequences of the invention, for example, SEQ ID NO: 2, 12, 88, 90, 92, 94, 96, 98, 100, and equivalogs. Such related polypeptides may comprise, for example, additions and/or deletions of one or more N-linked or O-linked glycosylation sites, or an addition and/or a deletion of one or more cysteine residues.

[0219] For example, Table 3 illustrates, e.g., that the codons AGC, AGT, TCA, TCC, TCG, and TCT all encode the same amino acid: serine. Accordingly, at each position in the sequence where there is a codon encoding serine, any of the above trinucleotide sequences can be used without altering the encoded polypeptide.

TABLE 3

| | |
|---|---|
| Amino acid | Possible Codons |

| | | | |
|---|---|---|---|
| Alanine | Ala | A | GCA GGC GCG GCT |
| Cysteine | Cys | C | TGC TGT |
| Aspartic acid | Asp | D | GAC GAT |
| Glutamic acid | Glu | E | GAA GAG |
| Phenylalanine | Phe | F | TTC TTT |
| Glycine | Gly | G | GGA GGC GGG GGT |
| Histidine | His | H | CAC CAT |
| Isoleucine | Ile | I | ATA ATC ATT |
| Lysine | Lys | K | AAA AAG |
| Leucine | Leu | L | TTA TTG CTA CTC CTG CTT |
| Methionine | Met | M | ATG |
| Asparagine | Asn | N | AAC AAT |
| Proline | Pro | P | CCA CCC CCG CCT |
| Glutamine | Gln | Q | CAA CAG |
| Arginine | Arg | R | AGA AGG CGA CGC CGG CGT |
| Serine | Ser | S | AGC AGT TCA TCC TCG TCT |
| Threonine | Thr | T | ACA ACC ACG ACT |
| Valine | Val | V | GTA GTC GTG GTT |
| Tryptophan | Trp | W | TGG |
| Tyrosine | Tyr | Y | TAC TAT |

[0220] Sequence alterations that do not change the amino acid sequence encoded by the polynucleotide are termed “silent” variations. With the exception of the codons ATG and TGG, encoding methionine and tryptophan, respectively, any of the possible codons for the same amino acid can be substituted by a variety of techniques, e.g., site-directed mutagenesis, available in the art. Accordingly, any and all such variations of a sequence selected from the above table are a feature of the invention.

[0221] In addition to silent variations, other conservative variations that alter one, or a few amino acid residues in the encoded polypeptide, can be made without altering the function of the polypeptide, these conservative variants are, likewise, a feature of the invention.

[0222] For example, substitutions, deletions and insertions introduced into the sequences provided in the Sequence Listing, are also envisioned by the invention. Such sequence modifications can be engineered into a sequence by site-directed mutagenesis (Wu (ed.) Methods Enzymol. (1993) vol. 217, Academic Press) or the other methods noted below. Amino acid substitutions are typically of single residues; insertions usually will be on the order of about from 1 to 10 amino acid residues; and deletions will range about from 1 to 30 residues. In preferred embodiments, deletions or insertions are made in adjacent pairs, e.g., a deletion of two residues or insertion of two residues. Substitutions, deletions, insertions or any combination thereof can be combined to arrive at a sequence. The mutations that are made in the polynucleotide encoding the transcription factor should not place the sequence out of reading frame and should not create complementary regions that could produce secondary mRNA structure. Preferably, the polypeptide encoded by the DNA performs the desired function.

[0223] Conservative substitutions are those in which at least one residue in the amino acid sequence has been removed and a different residue inserted in its place. Such substitutions generally are made in accordance with the Table 4 when it is desired to maintain the activity of the protein. Table 4 shows amino acids which can be substituted for an amino acid in a protein and which are typically regarded as conservative substitutions.

TABLE 4

| | Conservative |
|---|---|
| Residue | Substitutions |
| Ala | Ser |
| Arg | Lys |
| Asn | Gln; His |
| Asp | Glu |
| Gln | Asn |
| Cys | Ser |
| Glu | Asp |
| Gly | Pro |
| His | Asn; Gln |
| Ile | Leu, Val |
| Leu | Ile; Val |
| Lys | Arg; Gln |
| Met | Leu; Ile |
| Phe | Met; Leu; Tyr |
| Ser | Thr; Gly |
| Thr | Ser; Val |
| Trp | Tyr |
| Tyr | Trp;Phe |
| Val | Ile; Leu |

[0224] Similar substitutions are those in which at least one residue in the amino acid sequence has been removed and a different residue inserted in its place. Such substitutions generally are made in accordance with the Table 5 when it is desired to maintain the activity of the protein. Table 5 shows amino acids which can be substituted for an amino acid in a protein and which are typically regarded as structural and functional substitutions. For example, a residue in column 1 of Table 5 may be substituted with a residue in column 2; in addition, a residue in column 2 of Table 5 may be substituted with the residue of column 1.

TABLE 5

| | |
|---|---|
| Residue | Similar Substitutions |

| | |
|---|---|
| Ala | Ser; Thr; Gly; Val; Leu; Ile |
| Arg | Lys; His; Gly |
| Asn | Gln; His; Gly; Ser; Thr |
| Asp | Glu, Ser; Thr |
| Gln | Asn; Ala |
| Cys | Ser; Gly |
| Glu | Asp |
| Gly | Pro; Arg |
| His | Asn; Gln; Tyr; Phe; Lys; Arg |
| Ile | Ala; Leu; Val; Gly; Met |
| Leu | Ala; Ile; Val; Gly; Met |
| Lys | Arg; His; Gln; Gly; Pro |
| Met | Leu; Ile; Phe |
| Phe | Met; Leu; Tyr; Trp; His; Val; Ala |
| Ser | Thr; Gly; Asp; Ala; Val; Ile; His |
| Thr | Ser; Val; Ala; Gly |
| Trp | Tyr; Phe; His |
| Tyr | Trp; Phe; His |
| Val | Ala; Ile; Leu; Gly; Thr; Ser; Glu |

[0225] Substitutions that are less conservative than those in Table 5 can be selected by picking residues that differ more significantly in their effect on maintaining (a) the structure of the polypeptide backbone in the area of the substitution, for example, as a sheet or helical conformation, (b) the charge or hydrophobicity of the molecule at the target site, or (c) the bulk of the side chain. The substitutions which in general are expected to produce the greatest changes in protein properties will be those in which (a) a hydrophilic residue, e.g., seryl or threonyl, is substituted for (or by) a hydrophobic residue, e.g., leucyl, isoleucyl, phenylalanyl, valyl or alanyl; (b) a cysteine or proline is substituted for (or by) any other residue; (c) a residue having an electropositive side chain, e.g., lysyl, arginyl, or histidyl, is substituted for (or by) an electronegative residue, e.g., glutamyl or aspartyl; or (d) a residue having a bulky side chain, e.g., phenylalanine, is substituted for (or by) one not having a side chain, e.g., glycine.

Further Modifying Sequences of the Invention—Mutation/Forced Evolution

[0226] In addition to generating silent or conservative substitutions as noted, above, the present invention optionally includes methods of modifying the sequences of the Sequence Listing. In the methods, nucleic acid or protein modification methods are used to alter the given sequences to produce new sequences and/or to chemically or enzymatically modify given sequences to change the properties of the nucleic acids or proteins.

[0227] Thus, in one embodiment, given nucleic acid sequences are modified, e.g., according to standard mutagenesis or artificial evolution methods to produce modified sequences. The modified sequences may be created using purified natural polynucleotides isolated from any organism or may be synthesized from purified compositions and chemicals using chemical means well know to those of skill in the art. For example, Ausubel, supra, provides additional details on mutagenesis methods. Artificial forced evolution methods are described, for example, by Stemmer (1994) Nature 370: 389-391, Stemmer (1994) Proc. Natl. Acad. Sci. 91: 10747-10751, and U.S. Pat. Nos. 5,811,238, 5,837,500, and 6,242,568. Methods for engineering synthetic transcription factors and other polypeptides are described, for example, by Zhang et al. (2000) J Biol. Chem. 275: 33850-33860, Liu et al. (2001) J. Biol. Chem. 276: 11323-11334, and Isalan et al. (2001) Nature Biotechnol. 19: 656-660. Many other mutation and evolution methods are also available and expected to be within the skill of the practitioner.

[0228] Similarly, chemical or enzymatic alteration of expressed nucleic acids and polypeptides can be performed by standard methods. For example, sequence can be modified by addition of lipids, sugars, peptides, organic or inorganic compounds, by the inclusion of modified nucleotides or amino acids, or the like. For example, protein modification techniques are illustrated in Ausubel, supra. Further details on chemical and enzymatic modifications can be found herein. These modification methods can be used to modify any given sequence, or to modify any sequence produced by the various mutation and artificial evolution modification methods noted herein.

[0229] Accordingly, the invention provides for modification of any given nucleic acid by mutation, evolution, chemical or enzymatic modification, or other available methods, as well as for the products produced by practicing such methods, e.g., using the sequences herein as a starting substrate for the various modification approaches.

[0230] For example, optimized coding sequence containing codons preferred by a particular prokaryotic or eukaryotic host can be used e.g., to increase the rate of translation or to produce recombinant RNA transcripts having desirable properties, such as a longer half-life, as compared with transcripts produced using a non-optimized sequence. Translation stop codons can also be modified to reflect host preference. For example, preferred stop codons for Saccharomyces cerevisiae and mammals are TAA and TGA, respectively. The preferred stop codon for monocotyledonous plants is TGA, whereas insects and E. coli prefer to use TAA as the stop codon.

[0231] The polynucleotide sequences of the present invention can also be engineered in order to alter a coding sequence for a variety of reasons, including but not limited to, alterations which modify the sequence to facilitate cloning, processing and/or expression of the gene product. For example, alterations are optionally introduced using techniques which are well known in the art, e.g., site-directed mutagenesis, to insert new restriction sites, to alter glycosylation patterns, to change codon preference, to introduce splice sites, etc.

[0232] Furthermore, a fragment or domain derived from any of the polypeptides of the invention can be combined with domains derived from other transcription factors or synthetic domains to modify the biological activity of a transcription factor. For instance, a DNA-binding domain derived from a transcription factor of the invention can be combined with the activation domain of another transcription factor or with a synthetic activation domain. A transcription activation domain assists in initiating transcription from a DNA-binding site. Examples include the transcription activation region of VP16 or GAL4 (Moore et al. (1998) Proc. Natl. Acad. Sci. 95: 376-381; Aoyama et al. (1995) Plant Cell 7: 1773-1785), peptides derived from bacterial sequences (Ma and Ptashne (1987) Cell 51: 113-119) and synthetic peptides (Giniger and Ptashne (1987) Nature 330: 670-672).

Expression and Modification of Polypeptides

[0233] Typically, polynucleotide sequences of the invention are incorporated into recombinant DNA (or RNA) molecules that direct expression of polypeptides of the invention in appropriate host cells, transgenic plants, in vitro translation systems, or the like. Due to the inherent degeneracy of the genetic code, nucleic acid sequences which encode substantially the same or a functionally equivalent amino acid sequence can be substituted for any listed sequence to provide for cloning and expressing the relevant homolog.

[0234] The transgenic plants of the present invention comprising recombinant polynucleotide sequences are generally derived from parental plants, which may themselves be non-transformed (or non-transgenic) plants. These transgenic plants may either have a transcription factor gene “knocked out” (for example, with a genomic insertion by homologous recombination, an antisense or ribozyme construct) or expressed to a normal or wild-type extent. However, overexpressing transgenic “progeny” plants will exhibit greater mRNA levels, wherein the mRNA encodes a transcription factor, that is, a DNA-binding protein that is capable of binding to a DNA regulatory sequence and inducing transcription, and preferably, expression of a plant trait gene. Preferably, the mRNA expression level will be at least three-fold greater than that of the parental plant, or more preferably at least ten-fold greater mRNA levels compared to said parental plant, and most preferably at least fifty-fold greater compared to said parental plant.

Vectors, Promoters, and Expression Systems

[0235] The present invention includes recombinant constructs comprising one or more of the nucleic acid sequences herein. The constructs typically comprise a vector, such as a plasmid, a cosmid, a phage, a virus (e.g., a plant virus), a bacterial artificial chromosome (BAC), a yeast artificial chromosome (YAC), or the like, into which a nucleic acid sequence of the invention has been inserted, in a forward or reverse orientation. In a preferred aspect of this embodiment, the construct further comprises regulatory sequences, including, for example, a promoter, operably linked to the sequence. Large numbers of suitable vectors and promoters are known to those of skill in the art, and are commercially available.

[0236] General texts that describe molecular biological techniques useful herein, including the use and production of vectors, promoters and many other relevant topics, include Berger, Sambrook, supra and Ausubel, supra. Any of the identified sequences can be incorporated into a cassette or vector, e.g., for expression in plants. A number of expression vectors suitable for stable transformation of plant cells or for the establishment of transgenic plants have been described including those described in Weissbach and Weissbach (1989) Methods for Plant Molecular Biology, Academic Press, and Gelvin et al. (1990) Plant Molecular Biology Manual, Kluwer Academic Publishers. Specific examples include those derived from a Ti plasmid of Agrobacterium tumefaciens, as well as those disclosed by Herrera-Estrella et al. (1983) Nature 303: 209, Bevan (1984) Nucleic Acids Res. 12: 8711-8721, Klee (1985) Bio/Technology 3: 637-642, for dicotyledonous plants.

[0237] Alternatively, non-Ti vectors can be used to transfer the DNA into monocotyledonous plants and cells by using free DNA delivery techniques. Such methods can involve, for example, the use of liposomes, electroporation, microprojectile bombardment, silicon carbide whiskers, and viruses. By using these methods transgenic plants such as wheat, rice (Christou (1991) Bio/Technology 9: 957-962) and corn (Gordon-Kamm (1990) Plant Cell 2: 603-618) can be produced. An immature embryo can also be a good target tissue for monocots for direct DNA delivery techniques by using the particle gun (Weeks et al. (1993) Plant Physiol. 102: 1077-1084; Vasil (1993) Bio/Technology 10: 667-674; Wan and Lemeaux (1994) Plant Physiol. 104: 37-48, and for Agrobacterium-mediated DNA transfer (Ishida et al. (1996) Nature Biotechnol. 14: 745-750).

[0238] Typically, plant transformation vectors include one or more cloned plant coding sequence (genomic or cDNA) under the transcriptional control of 5′ and 3′ regulatory sequences and a dominant selectable marker. Such plant transformation vectors typically also contain a promoter (e.g., a regulatory region controlling inducible or constitutive, environmentally-or developmentally-regulated, or cell- or tissue-specific expression), a transcription initiation start site, an RNA processing signal (such as intron splice sites), a transcription termination site, and/or a polyadenylation signal.

[0239] A potential utility for the transcription factor polynucleotides disclosed herein is the isolation of promoter elements from these genes that can be used to program expression in plants of any genes. Each transcription factor gene disclosed herein is expressed in a unique fashion, as determined by promoter elements located upstream of the start of translation, and additionally within an intron of the transcription factor gene or downstream of the termination codon of the gene. As is well known in the art, for a significant portion of genes, the promoter sequences are located entirely in the region directly upstream of the start of translation. In such cases, typically the promoter sequences are located within 2.0 kb of the start of translation, or within 1.5 kb of the start of translation, frequently within 1.0 kb of the start of translation, and sometimes within 0.5 kb of the start of translation.

[0240] The promoter sequences can be isolated according to methods known to one skilled in the art.

[0241] Examples of constitutive plant promoters which can be useful for expressing the TF sequence include: the cauliflower mosaic virus (CaMV) 35S promoter, which confers constitutive, high-level expression in most plant tissues (see, e.g., Odell et al. (1985) Nature 313: 810-812); the nopaline synthase promoter (An et al. (1988) Plant Physiol. 88: 547-552); and the octopine synthase promoter (Fromm et al. (1989) Plant Cell 1: 977-984).

[0242] The transcription factors of the invention may be operably linked with a specific promoter that causes the transcription factor to be expressed in response to environmental, tissue-specific or temporal signals. A variety of plant gene promoters that regulate gene expression in response to environmental, hormonal, chemical, developmental signals, and in a tissue-active manner can be used for expression of a TF sequence in plants. Choice of a promoter is based largely on the phenotype of interest and is determined by such factors as tissue (e.g., seed, fruit, root, pollen, vascular tissue, flower, carpel, etc.), inducibility (e.g., in response to wounding, heat, cold, drought, light, pathogens, etc.), timing, developmental stage, and the like. Numerous known promoters have been characterized and can favorably be employed to promote expression of a polynucleotide of the invention in a transgenic plant or cell of interest. For example, tissue specific promoters include: seed-specific promoters (such as the napin, phaseolin or DC3 promoter described in U.S. Pat. No. 5,773,697), fruit-specific promoters that are active during fruit ripening (such as the dru 1 promoter (U.S. Pat. No. 5,783,393), or the 2A11 promoter (U.S. Pat. No. 4,943,674) and the tomato polygalacturonase promoter (Bird et al. (1988) Plant Mol. Biol. 11: 651-662), root-specific promoters, such as those disclosed in U.S. Pat. Nos. 5,618,988, 5,837,848 and 5,905,186, pollen-active promoters such as PTA29, PTA26 and PTA13 (U.S. Pat. No. 5,792,929), promoters active in vascular tissue (Ringli and Keller (1998) Plant Mol. Biol. 37: 977-988), flower-specific (Kaiser et al. (1995) Plant Mol. Biol. 28: 231-243), pollen (Baerson et al. (1994) Plant Mol. Biol. 26: 1947-1959), carpels (Ohl et al. (1990) Plant Cell 2: 837-848), pollen and ovules (Baerson et al. (1993) Plant Mol. Biol. 22: 255-267), auxin-inducible promoters (such as that described in van der Kop et al. (1999) Plant Mol. Biol. 39: 979-990 or Baumann et al., (1999) Plant Cell 11: 323-334), cytokinin-inducible promoter (Guevara-Garcia (1998) Plant Mol. Biol. 38: 743-753), promoters responsive to gibberellin (Shi et al. (1998) Plant Mol. Biol. 38: 1053-1060, Willmott et al. (1998) Plant Molec. Biol. 38: 817-825) and the like. Additional promoters are those that elicit expression in response to heat (Ainley et al. (1993) Plant Mol. Biol. 22: 13-23), light (e.g., the pea rbcS-3A promoter, Kuhlemeier et al. (1989) Plant Cell 1: 471-478, and the maize rbcS promoter, Schaffner and Sheen (1991) Plant Cell 3: 997-1012); wounding (e.g., wunI, Siebertz et al. (1989) Plant Cell 1: 961-968); pathogens (such as the PR-1 promoter described in Buchel et al. (1999) Plant Mol. Biol. 40: 387-396, and the PDF1.2 promoter described in Manners et al. (1998) Plant Mol. Biol. 38: 1071-1080), and chemicals such as methyl jasmonate or salicylic acid (Gatz (1997) Annu. Rev. Plant Physiol. Plant Mol. Biol. 48: 89-108). In addition, the timing of the expression can be controlled by using promoters such as those acting at senescence (Gan and Amasino (1995) Science 270: 1986-1988); or late seed development (Odell et al. (1994) Plant Physiol. 106: 447-458).

[0243] Plant expression vectors can also include RNA processing signals that can be positioned within, upstream or downstream of the coding sequence. In addition, the expression vectors can include additional regulatory sequences from the 3′-untranslated region of plant genes, e.g., a 3′ terminator region to increase mRNA stability of the mRNA, such as the PI-II terminator region of potato or the octopine or nopaline synthase 3′ terminator regions.

Additional Expression Elements

[0244] Specific initiation signals can aid in efficient translation of coding sequences. These signals can include, e.g., the ATG initiation codon and adjacent sequences. In cases where a coding sequence, its initiation codon and upstream sequences are inserted into the appropriate expression vector, no additional translational control signals may be needed. However, in cases where only coding sequence (e.g., a mature protein coding sequence), or a portion thereof, is inserted, exogenous transcriptional control signals including the ATG initiation codon can be separately provided. The initiation codon is provided in the correct reading frame to facilitate transcription. Exogenous transcriptional elements and initiation codons can be of various origins, both natural and synthetic. The efficiency of expression can be enhanced by the inclusion of enhancers appropriate to the cell system in use.

Expression Hosts

[0245] The present invention also relates to host cells which are transduced with vectors of the invention, and the production of polypeptides of the invention (including fragments thereof) by recombinant techniques. Host cells are genetically engineered (i.e., nucleic acids are introduced, e.g., transduced, transformed or transfected) with the vectors of this invention, which may be, for example, a cloning vector or an expression vector comprising the relevant nucleic acids herein. The vector is optionally a plasmid, a viral particle, a phage, a naked nucleic acid, etc. The engineered host cells can be cultured in conventional nutrient media modified as appropriate for activating promoters, selecting transformants, or amplifying the relevant gene. The culture conditions, such as temperature, pH and the like, are those previously used with the host cell selected for expression, and will be apparent to those skilled in the art and in the references cited herein, including, Sambrook, supra and Ausubel, supra.

[0246] The host cell can be a eukaryotic cell, such as a yeast cell, or a plant cell, or the host cell can be a prokaryotic cell, such as a bacterial cell. Plant protoplasts are also suitable for some applications. For example, the DNA fragments are introduced into plant tissues, cultured plant cells or plant protoplasts by standard methods including electroporation (Fromm et al. (1985) Proc. Natl. Acad. Sci. 82: 5824-5828, infection by viral vectors such as cauliflower mosaic virus (CaMV) (Hohn et al. (1982) Molecular Biology of Plant Tumors Academic Press, New York, N.Y., pp. 549-560; U.S. Pat. No. 4,407,956), high velocity ballistic penetration by small particles with the nucleic acid either within the matrix of small beads or particles, or on the surface (Klein et al. (1987) Nature 327: 70-73), use of pollen as vector (WO 85/01856), or use of Agrobacterium tumefaciens or A. rhizogenes carrying a T-DNA plasmid in which DNA fragments are cloned. The T-DNA plasmid is transmitted to plant cells upon infection by Agrobacterium tumefaciens, and a portion is stably integrated into the plant genome (Horsch et al. (1984) Science 233: 496-498; Fraley et al. (1983) Proc. Natl. Acad. Sci. 80: 4803-4807).

[0247] The cell can include a nucleic acid of the invention that encodes a polypeptide, wherein the cell expresses a polypeptide of the invention. The cell can also include vector sequences, or the like. Furthermore, cells and transgenic plants that include any polypeptide or nucleic acid above or throughout this specification, e.g., produced by transduction of a vector of the invention, are an additional feature of the invention.

[0248] For long-term, high-yield production of recombinant proteins, stable expression can be used. Host cells transformed with a nucleotide sequence encoding a polypeptide of the invention are optionally cultured under conditions suitable for the expression and recovery of the encoded protein from cell culture. The protein or fragment thereof produced by a recombinant cell may be secreted, membrane-bound, or contained intracellularly, depending on the sequence and/or the vector used. As will be understood by those of skill in the art, expression vectors containing polynucleotides encoding mature proteins of the invention can be designed with signal sequences which direct secretion of the mature polypeptides through a prokaryotic or eukaryotic cell membrane.

Modified Amino Acid Residues

[0249] Polypeptides of the invention may contain one or more modified amino acid residues. The presence of modified amino acids may be advantageous in, for example, increasing polypeptide half-life, reducing polypeptide antigenicity or toxicity, increasing polypeptide storage stability, or the like. Amino acid residue(s) are modified, for example, co-translationally or post-translationally during recombinant production or modified by synthetic or chemical means.

[0250] Non-limiting examples of a modified amino acid residue include incorporation or other use of acetylated amino acids, glycosylated amino acids, sulfated amino acids, prenylated (e.g., farnesylated, geranylgeranylated) amino acids, PEG modified (e.g., “PEGylated”) amino acids, biotinylated amino acids, carboxylated amino acids, phosphorylated amino acids, etc. References adequate to guide one of skill in the modification of amino acid residues are replete throughout the literature.

[0251] The modified amino acid residues may prevent or increase affinity of the polypeptide for another molecule, including, but not limited to, polynucleotide, proteins, carbohydrates, lipids and lipid derivatives, and other organic or synthetic compounds.

Identification of Additional Protein Factors

[0252] A transcription factor provided by the present invention can also be used to identify additional endogenous or exogenous molecules that can affect a phentoype or trait of interest. Such molecules include endogenous molecules that are acted upon either at a transcriptional level by a transcription factor of the invention to modify a phenotype as desired. For example, the transcription factors can be employed to identify one or more downstream genes that are subject to a regulatory effect of the transcription factor. In one approach, a transcription factor or transcription factor homolog of the invention is expressed in a host cell, e.g., a transgenic plant cell, tissue or explant, and expression products, either RNA or protein, of likely or random targets are monitored, e.g., by hybridization to a microarray of nucleic acid probes corresponding to genes expressed in a tissue or cell type of interest, by two-dimensional gel electrophoresis of protein products, or by any other method known in the art for assessing expression of gene products at the level of RNA or protein. Alternatively, a transcription factor of the invention can be used to identify promoter sequences (such as binding sites on DNA sequences) involved in the regulation of a downstream target. After identifying a promoter sequence, interactions between the transcription factor and the promoter sequence can be modified by changing specific nucleotides in the promoter sequence or specific amino acids in the transcription factor that interact with the promoter sequence to alter a plant trait. Typically, transcription factor DNA-binding sites are identified by gel shift assays. After identifying the promoter regions, the promoter region sequences can be employed in double-stranded DNA arrays to identify molecules that affect the interactions of the transcription factors with their promoters (Bulyk et al. (1999) Nature Biotechnol. 17: 573-577).

[0253] The identified transcription factors are also useful to identify proteins that modify the activity of the transcription factor. Such modification can occur by covalent modification, such as by phosphorylation, or by protein-protein (homo or-heteropolymer) interactions. Any method suitable for detecting protein-protein interactions can be employed. Among the methods that can be employed are co-immunoprecipitation, cross-linking and co-purification through gradients or chromatographic columns, and the two-hybrid yeast system.

[0254] The two-hybrid system detects protein interactions in vivo and is described in Chien et al. ((1991) Proc. Natl. Acad. Sci. 88: 9578-9582) and is commercially available from Clontech (Palo Alto, Calif.). In such a system, plasmids are constructed that encode two hybrid proteins: one consists of the DNA-binding domain of a transcription activator protein fused to the TF polypeptide and the other consists of the transcription activator protein's activation domain fused to an unknown protein that is encoded by a cDNA that has been recombined into the plasmid as part of a cDNA library. The DNA-binding domain fusion plasmid and the cDNA library are transformed into a strain of the yeast Saccharomyces cerevisiae that contains a reporter gene (e.g., lacZ) whose regulatory region contains the transcription activator's binding site. Either hybrid protein alone cannot activate transcription of the reporter gene. Interaction of the two hybrid proteins reconstitutes the functional activator protein and results in expression of the reporter gene, which is detected by an assay for the reporter gene product. Then, the library plasmids responsible for reporter gene expression are isolated and sequenced to identify the proteins encoded by the library plasmids. After identifying proteins that interact with the transcription factors, assays for compounds that interfere with the TF protein-protein interactions can be preformed.

Subsequences

[0255] Also contemplated are uses of polynucleotides, also referred to herein as oligonucleotides, typically having at least 12 bases, preferably at least 15, more preferably at least 20, 30, or 50 bases, which hybridize under at least highly stringent (or ultra-high stringent or ultra-ultra-high stringent conditions) conditions to a polynucleotide sequence described above. The polynucleotides may be used as probes, primers, sense and antisense agents, and the like, according to methods as noted supra.

[0256] Subsequences of the polynucleotides of the invention, including polynucleotide fragments and oligonucleotides are useful as nucleic acid probes and primers. An oligonucleotide suitable for use as a probe or primer is at least about 15 nucleotides in length, more often at least about 18 nucleotides, often at least about 21 nucleotides, frequently at least about 30 nucleotides, or about 40 nucleotides, or more in length. A nucleic acid probe is useful in hybridization protocols, e.g., to identify additional polypeptide homologs of the invention, including protocols for microarray experiments. Primers can be annealed to a complementary target DNA strand by nucleic acid hybridization to form a hybrid between the primer and the target DNA strand, and then extended along the target DNA strand by a DNA poiymerase enzyme. Primer pairs can be used for amplification of a nucleic acid sequence, e.g., by the polymerase chain reaction (PCR) or other nucleic-acid amplification methods. See Sambrook, supra, and Ausubel, supra.

[0257] In addition, the invention includes an isolated or recombinant polypeptide including a subsequence of at least about 15 contiguous amino acids encoded by the recombinant or isolated polynucleotides of the invention. For example, such polypeptides, or domains or fragments thereof, can be used as immunogens, e.g., to produce antibodies specific for the polypeptide sequence, or as probes for detecting a sequence of interest. A subsequence can range in size from about 15 amino acids in length up to and including the full length of the polypeptide.

[0258] To be encompassed by the present invention, an expressed polypeptide which comprises such a polypeptide subsequence performs at least one biological function of the intact polypeptide in substantially the same manner, or to a similar extent, as does the intact polypeptide. For example, a polypeptide fragment can comprise a recognizable structural motif or functional domain such as a DNA binding domain that activates transcription, e.g., by binding to a specific DNA promoter region an activation domain, or a domain for protein-protein interactions.

Production of Transgenic Plants

[0259] Modification of Traits

[0260] The polynucleotides of the invention are favorably employed to produce transgenic plants with various traits, or characteristics, that have been modified in a desirable manner, e.g., to improve the seed characteristics of a plant. For example, alteration of expression levels or patterns (e.g., spatial or temporal expression patterns) of one or more of the transcription factors (or transcription factor homologs) of the invention, as compared with the levels of the same protein found in a wild-type plant, can be used to modify a plant's traits. An illustrative example of trait modification, improved characteristics, by altering expression levels of a particular transcription factor is described further in the Examples and the Sequence Listing.

[0261] Arabidopsis as a model system

[0262] Arabidopsis thaliana is the object of rapidly growing attention as a model for genetics and metabolism in plants. Arabidopsis has a small genome, and well-documented studies are available. It is easy to grow in large numbers and mutants defining important genetically controlled mechanisms are either available, or can readily be obtained. Various methods to introduce and express isolated homologous genes are available (see Koncz et al., eds., Methods in Arabidopsis Research (1992) World Scientific, New Jersey, N.J., in “Preface”). Because of its small size, short life cycle, obligate autogamy and high fertility, Arabidopsis is also a choice organism for the isolation of mutants and studies in morphogenetic and development pathways, and control of these pathways by transcription factors (Koncz supra, p. 72). A number of studies introducing transcription factors into A. thaliana have demonstrated the utility of this plant for understanding the mechanisms of gene regulation and trait alteration in plants. (See, for example, Koncz supra, and U.S. Pat. No. 6,417,428).

[0263] Arabidopsis Genes in Transgenic Plants.

[0264] Expression of genes which encode transcription factors modify expression of endogenous genes, polynucleotides, and proteins are well known in the art. In addition, transgenic plants comprising isolated polynucleotides encoding transcription factors may also modify expression of endogenous genes, polynucleotides, and proteins. Examples include Peng et al. (1997 Genes and Development 11: 3194-3205) and Peng et al. (1999 Nature 400: 256-261). In addition, many others have demonstrated that an Arabidopsis transcription factor expressed in an exogenous plant species elicits the same or very similar phenotypic response. See, for example, Fu et al. (2001 Plant Cell 13: 1791-1802); Nandi et al. (2000 Curr. Biol. 10: 215-218); Coupland (1995 Nature 377: 482-483); and Weigel and Nilsson (1995, Nature 377: 482-500).

[0265] Homologous Genes Introduced into Transgenic Plants.

[0266] Homologous genes that may be derived from any plant, or from any source whether natural, synthetic, semi-synthetic or recombinant, and that share significant sequence identity or similarity to those provided by the present invention, may be introduced into plants, for example, crop plants, to confer desirable or improved traits. Consequently, transgenic plants may be produced that comprise a recombinant expression vector or cassette with a promoter operably linked to one or more sequences homologous to presently disclosed sequences. The promoter may be, for example, a plant or viral promoter.

[0267] The invention thus provides for methods for preparing transgenic plants, and for modifying plant traits. These methods include introducing into a plant a recombinant expression vector or cassette comprising a functional promoter operably linked to one or more sequences homologous to presently disclosed sequences. Plants and kits for producing these plants that result from the application of these methods are also encompassed by the present invention.

[0268] Transcription Factors of Interest for the Modification of Plant Traits

[0269] Currently, the existence of a series of maturity groups for different latitudes represents a major barrier to the introduction of new valuable traits. Any trait (e.g. disease resistance) has to be bred into each of the different maturity groups separately, a laborious and costly exercise. The availability of single strain, which could be grown at any latitude, would therefore greatly increase the potential for introducing new traits to crop species such as soybean and cotton.

[0270] For the specific effects, traits and utilities conferred to plants, one or more transcription factor genes of the present invention may be used to increase or decrease, or improve or prove deleterious to a given trait. For example, knocking out a transcription factor gene that naturally occurs in a plant, or suppressing the gene (with, for example, antisense suppression), may cause decreased tolerance to a drought stress relative to non-transformed or wild-type plants. By overexpressing this gene, the plant may experience increased tolerance to the same stress. More than one transcription factor gene may be introduced into a plant, either by transforming the plant with one or more vectors comprising two or more transcription factors, or by selective breeding of plants to yield hybrid crosses that comprise more than one introduced transcription factor.

Genes, Traits and Utilities that Affect Plant Characteristics

[0271] Plant transcription factors can modulate gene expression, and, in turn, be modulated by the environmental experience of a plant. Significant alterations in a plant's environment invariably result in a change in the plant's transcription factor gene expression pattern. Altered transcription factor expression patterns generally result in phenotypic changes in the plant. Transcription factor gene product(s) in transgenic plants then differ(s) in amounts or proportions from that found in wild-type or non-transformed plants, and those transcription factors likely represent polypeptides that are used to alter the response to the environmental change. By way of example, it is well accepted in the art that analytical methods based on altered expression patterns may be used to screen for phenotypic changes in a plant far more effectively than can be achieved using traditional methods.

[0272] Sugar Sensing.

[0273] In addition to their important role as an energy source and structural component of the plant cell, sugars are central regulatory molecules that control several aspects of plant physiology, metabolism and development (Hsieh et al. (1998) Proc. Natl. Acad. Sci. 95: 13965-13970). It is thought that this control is achieved by regulating gene expression and, in higher plants, sugars have been shown to repress or activate plant genes involved in many essential processes such as photosynthesis, glyoxylate metabolism, respiration, starch and sucrose synthesis and degradation, pathogen response, wounding response, cell cycle regulation, pigmentation, flowering and senescence. The mechanisms by which sugars control gene expression are not understood.

[0274] Several sugar sensing mutants have turned out to be allelic to abscisic acid (ABA) and ethylene mutants. ABA is found in all photosynthetic organisms and acts as a key regulator of transpiration, stress responses, embryogenesis, and seed germination. Most ABA effects are related to the compound acting as a signal of decreased water availability, whereby it triggers a reduction in water loss, slows growth, and mediates adaptive responses. However, ABA also influences plant growth and development via interactions with other phytohormones. Physiological and molecular studies indicate that maize and Arabidopsis have almost identical pathways with regard to ABA biosynthesis and signal transduction. For further review, see Finkelstein and Rock ((2002) Abscisic acid biosynthesis and response (In The Arabidopsis Book, Editors: Somerville and Meyerowitz (American Society of Plant Biologists, Rockville, Md.).

[0275] This potentially implicates the sequences of the invention that, when overexpressed, confer a sugar sensing or hormone signaling phenotype in plants. On the other hand, the sucrose treatment used in these experiments (9.4% w/v) could also be an osmotic stress. Therefore, one could interpret these data as an indication that these transgenic lines are more tolerant to osmotic stress. However, it is well known that plant responses to ABA, osmotic and other stress may be linked, and these different treatments may even act in a synergistic manner to increase the degree of a response. For example, Xiong, Ishitani, and Zhu ((1999) Plant Physiol. 119: 205-212) have shown that genetic and molecular studies may be used to show extensive interaction between osmotic stress, temperature stress, and ABA responses in plants. These investigators analyzed the expression of RD29A-LUC in response to various treatment regimes in Arabidopsis. The RD29A promoter contains both the ABA-responsive and the dehydration-responsive element—also termed the C-repeat—and can be activated by osmotic stress, low temperature, or ABA treatment; transcription of the RD29A gene in response to osmotic and cold stresses is mediated by both ABA-dependent and ABA-independent pathways (Xiong, Ishitani, and Zhu (1999) supra). LUC refers to the firefly luciferase coding sequence, which, in this case, was driven by the stress responsive RD29A promoter. The results revealed both positive and negative interactions, depending on the nature and duration of the treatments. Low temperature stress was found to impair osmotic signaling but moderate heat stress strongly enhanced osmotic stress induction, thus acting synergistically with osmotic signaling pathways. In this study, the authors reported that osmotic stress and ABA can act synergistically by showing that the treatments simultaneously induced transgene and endogenous gene expression. Similar results were reported by Bostock and Quatrano ((1992) Plant Physiol. 98: 1356-1363), who found that osmotic stress and ABA act synergistically and induce maize Em gene expression. Ishitani et al (1997) Plant Cell 9: 1935-1949) isolated a group of Arabidopsis single-gene mutations that confer enhanced responses to both osmotic stress and ABA. The nature of the recovery of these mutants from osmotic stress and ABA treatment suggested that although separate signaling pathways exist for osmotic stress and ABA, the pathways share a number of components; these common components may mediate synergistic interactions between osmotic stress and ABA. Thus, contrary to the previously-held belief that ABA-dependent and ABA-independent stress signaling pathways act in a parallel manner, our data reveal that these pathways cross-talk and converge to activate stress gene expression.

[0276] Because sugars are important signaling molecules, the ability to control either the concentration of a signaling sugar or how the plant perceives or responds to a signaling sugar could be used to control plant development, physiology or metabolism. For example, the flux of sucrose (a disaccharide sugar used for systemically transporting carbon and energy in most plants) has been shown to affect gene expression and alter storage compound accumulation in seeds. Manipulation of the sucrose signaling pathway in seeds may therefore cause seeds to have more protein, oil or carbohydrate, depending on the type of manipulation. Similarly, in tubers, sucrose is converted to starch which is used as an energy store. It is thought that sugar signaling pathways may partially determine the levels of starch synthesized in the tubers. The manipulation of sugar signaling in tubers could lead to tubers with a higher starch content.

[0277] Thus, altering the expression of the presently disclosed transcription factor genes that manipulate the sugar signal transduction pathway, including, for example, GI 75, G303, G354, G481, G916, G922, G1069, G1073, G1820, G2053, G2701, G2789, G2839, G2854, along with their equivalogs, or that exhibit an osmotic stress phenotype, including, for example, G47, G482, G489 or G1069, G1073, as evidenced by their tolerance to, for example, high mannitol, salt or PEG, may be used to produce plants with desirable traits, including increased drought tolerance. In particular, manipulation of sugar signal transduction pathways could be used to alter source-sink relationships in seeds, tubers, roots and other storage organs leading to increase in yield.

[0278] Abiotic stress: drought and low humidity tolerance. Exposure to dehydration invokes similar survival strategies in plants as does freezing stress (see, for example, Yelenosky (1989) Plant Physiol 89: 444-451) and drought stress induces freezing tolerance (see, for example, Siminovitch et al. (1982) Plant Physiol 69: 250-255; and Guy et al. (1992) Planta 188: 265-270). In addition to the induction of cold-acclimation proteins, strategies that allow plants to survive in low water conditions may include, for example, reduced surface area, or surface oil or wax production. Modifying the expression of the presently disclosed transcription factor genes, including G2133, G1274, G922, G2999, G3086, G354, G1792, G2053, G975, G1069, G916, G1820, G2701, G47, G2854, G2789, G634, G175, G2839, G1452, G3083, G489, G303, G2992, and G682, and their equivalogs, may be used to increase a plant's tolerance to low water conditions and provide the benefits of improved survival, increased yield and an extended geographic and temporal planting range.

[0279] Osmotic stress. Modification of the expression of a number of presently disclosed transcription factor genes, e.g., G47, G482, G489 or G1069, G2053 and their equivalogs, may be used to increase germination rate or growth under adverse osmotic conditions, which could impact survival and yield of seeds and plants. Osmotic stresses may be regulated by specific molecular control mechanisms that include genes controlling water and ion movements, functional and structural-stress-induced proteins, signal perception and transduction, and free radical scavenging, and many others (Wang et al. (2001) Acta Hort. (ISHS) 560: 285-292). Instigators of osmotic stress include freezing, drought and high salinity, each of which are discussed in more detail below.

[0280] In many ways, freezing, high salt and drought have similar effects on plants, not the least of which is the induction of common polypeptides that respond to these different stresses. For example, freezing is similar to water deficit in that freezing reduces the amount of water available to a plant. Exposure to freezing temperatures may lead to cellular dehydration as water leaves cells and forms ice crystals in intercellular spaces (Buchanan, supra). As with high salt concentration and freezing, the problems for plants caused by low water availability include mechanical stresses caused by the withdrawal of cellular water. Thus, the incorporation of transcription factors that modify a plant's response to osmotic stress into, for example, a crop or ornamental plant, may be useful in reducing damage or loss. Specific effects caused by freezing, high salt and drought are addressed below.

[0281] The relationship between Salt, Drought and Freezing Tolerance

[0282] Plants are subject to a range of environmental challenges. Several of these, including drought stress, have the ability to impact whole plant and cellular water availability. Not surprisingly, then, plant responses to this collection of stresses are related. In a recent review, Zhu notes that “most studies on water stress signaling have focused on salt stress primarily because plant responses to salt and drought are closely related and the mechanisms overlap” (Zhu (2002) Ann. Rev. Plant Biol. 53: 247-273). Many examples of similar responses and pathways to this set of stresses have been documented. For example, the CBF transcription factors have been shown to condition resistance to salt, freezing and drought (Kasuga et al. (1999) Nature Biotech. 17: 287-291). The Arabidopsis rd29B gene is induced in response to both salt and dehydration stress, a process that is mediated largely through an ABA signal transduction process (Uno et al. (2000) Proc. Natl. Acad. Sci. USA 97: 11632-11637), resulting in altered activity of transcription factors that bind to an upstream element within the rd29B promoter. In Mesembryanthemum crystallinum (ice plant), Patharker and Cushman have shown that a calcium-dependent protein kinase (McCDPK1) is induced by exposure to both drought and salt stresses (Patharker and Cushman (2000) Plant J. 24: 679-691). The stress-induced kinase was also shown to phosphorylate a transcription factor, presumably altering its activity, although transcript levels of the target transcription factor are not altered in response to salt or drought stress. Similarly, Saijo et al. demonstrated that a rice salt/drought-induced calmodulin-dependent protein kinase (OsCDPK7) conferred increased salt and drought tolerance to rice when overexpressed (Saijo et al. (2000) Plant J. 23: 319-327).

[0283] Exposure to dehydration invokes similar survival strategies in plants as does freezing stress (see, for example, Yelenosky (1989) Plant Physiol 89: 444-451) and drought stress induces freezing tolerance (see, for example, Siminovitch et al. (1982) Plant Physiol 69: 250-255; and Guy et al. (1992) Planta 188: 265-270). In addition to the induction of cold-acclimation proteins, strategies that allow plants to survive in low water conditions may include, for example, reduced surface area, or surface oil or wax production.

[0284] Consequently, one skilled in the art would expect that some pathways involved in resistance to one of these stresses, and hence regulated by an individual transcription factor, will also be involved in resistance to another of these stresses, regulated by the same or homologous transcription factors. Of course, the overall resistance pathways are related, not identical, and therefore not all transcription factors controlling resistance to one stress will control resistance to the other stresses. Nonetheless, if a transcription factor conditions resistance to one of these stresses, it would be apparent to one skilled in the art to test for resistance to these related stresses.

[0285] Thus, the genes of the sequence listing, including, for example, G175, G922, G1452, G1820, G2701, G2999, G3086, and their equivalogs, that provide tolerance to salt may be used to engineer salt tolerant crops and trees that can flourish in soils with high saline content or under drought conditions. In particular, increased salt tolerance during the germination stage of a plant enhances survival and yield. Presently disclosed transcription factor genes that provide increased salt tolerance during germination, the seedling stage, and throughout a plant's life cycle, would find particular value for imparting survival and yield in areas where a particular crop would not normally prosper.

[0286] Summary of altered plant characteristics. The clades of structurally and functionally related sequences that derive from a wide range of plants, including the polynucleotides of the invention (for example, SEQ ID 1, 11, 87, 89, 91, 93, 95, 97, and 99, polynucleotides that encode polypeptide SEQ ID NOs: 2, 12, 88, 90, 92, 94, 96, 98, 100, fragments thereof, paralogs, orthologs, equivalogs, and fragments thereof, is provided. These sequences have been shown in laboratory and field experiments to confer altered size and abiotic stress tolerance phenotypes in plants. The invention also provides polypeptides comprising SEQ ID NOs: 2, 12, 88, 90, 92, 94, 96, 98, and 100, and fragments thereof, conserved domains thereof, paralogs, orthologs, equivalogs, and fragments thereof. Plants that overexpress these sequences have been observed to exhibit a sugar sensing phenotype and/or be more tolerant to a wide variety of abiotic stresses, including drought and high salt stress. Many of the orthologs of these sequences are listed in the Sequence Listing, and due to the high degree of structural similarity to the sequences of the invention, it is expected that these sequences will also function to increase drought stress tolerance. The invention also encompasses the complements of the polynucleotides. The polynucleotides are useful for screening libraries of molecules or compounds for specific binding and for creating transgenic plants having increased drought stress tolerance.

Antisense and Co-Suppression

[0287] In addition to expression of the nucleic acids of the invention as gene replacement or plant phenotype modification nucleic acids, the nucleic acids are also useful for sense and anti-sense suppression of expression, e.g. to down-regulate expression of a nucleic acid of the invention, e.g. as a further mechanism for modulating plant phenotype. That is, the nucleic acids of the invention, or subsequences or anti-sense sequences thereof, can be used to block expression of naturally occurring homologous nucleic acids. A variety of sense and anti-sense technologies are known in the art, e.g. as set forth in Lichtenstein and Nellen (1997) Antisense Technology: A Practical Approach IRL Press at Oxford University Press, Oxford, U.K. Antisense regulation is also described in Crowley et al. (1985) Cell 43: 633-641; Rosenberg et al. (1985) Nature 313: 703-706; Preiss et al. (1985) Nature 313: 27-32; Melton (1985) Proc. Natl. Acad. Sci. 82: 144-148; Izant and Weintraub (1985) Science 229: 345-352; and Kim and Wold (1985) Cell 42: 129-138. Additional methods for antisense regulation are known in the art. Antisense regulation has been used to reduce or inhibit expression of plant genes in, for example in European Patent Publication No. 271988. Antisense RNA may be used to reduce gene expression to produce a visible or biochemical phenotypic change in a plant (Smith et al. (1988) Nature, 334: 724-726; Smith et al. (1990) Plant Mol. Biol. 14: 369-379). In general, sense or anti-sense sequences are introduced into a cell, where they are optionally amplified, e.g. by transcription. Such sequences include both simple oligonucleotide sequences and catalytic sequences such as ribozymes.

[0288] For example, a reduction or elimination of expression (i.e., a “knock-out”) of a transcription factor or transcription factor homolog polypeptide in a transgenic plant, e.g., to modify a plant trait, can be obtained by introducing an antisense construct corresponding to the polypeptide of interest as a cDNA. For antisense suppression, the transcription factor or homolog cDNA is arranged in reverse orientation (with respect to the coding sequence) relative to the promoter sequence in the expression vector. The introduced sequence need not be the full length cDNA or gene, and need not be identical to the cDNA or gene found in the plant type to be transformed. Typically, the antisense sequence need only be capable of hybridizing to the target gene or RNA of interest. Thus, where the introduced sequence is of shorter length, a higher degree of homology to the endogenous transcription factor sequence will be needed for effective antisense suppression. While antisense sequences of various lengths can be utilized, preferably, the introduced antisense sequence in the vector will be at least 30 nucleotides in length, and improved antisense suppression will typically be observed as the length of the antisense sequence increases. Preferably, the length of the antisense sequence in the vector will be greater than 100 nucleotides. Transcription of an antisense construct as described results in the production of RNA molecules that are the reverse complement of mRNA molecules transcribed from the endogenous transcription factor gene in the plant cell.

[0289] Suppression of endogenous transcription factor gene expression can also be achieved using RNA interference, or RNAi. RNAi is a post-transcriptional, targeted gene-silencing technique that uses double-stranded RNA (dsRNA) to incite degradation of messenger RNA (mRNA) containing the same sequence as the dsRNA (Constans, (2002) The Scientist 16:36). Small interfering RNAs, or siRNAs are produced in at least two steps: an endogenous ribonuclease cleaves longer dsRNA into shorter, 21-23 nucleotide-long RNAs. The siRNA segments then mediate the degradation of the target mRNA (Zamore, (2001) Nature Struct. Biol., 8:746-50). RNAi has been used for gene function determination in a manner similar to antisense oligonucleotides (Constans, (2002) The Scientist 16:36). Expression vectors that continually express siRNAs in transiently and stably transfected have been engineered to express small hairpin RNAs (shRNAs), which get processed in vivo into siRNAs-like molecules capable of carrying out gene-specific silencing (Brummelkamp et al., (2002) Science 296:550-553, and Paddison, et al. (2002) Genes & Dev. 16:948-958). Post-transcriptional gene silencing by double-stranded RNA is discussed in further detail by Hammond et al. (2001) Nature Rev Gen 2: 110-119, Fire et al. (1998) Nature 391: 806-811 and Timmons and Fire (1998) Nature 395: 854. Vectors in which RNA encoded by a transcription factor or transcription factor homolog cDNA is over-expressed can also be used to obtain co-suppression of a corresponding endogenous gene, e.g., in the manner described in U.S. Pat. No. 5,231,020 to Jorgensen. Such co-suppression (also termed sense suppression) does not require that the entire transcription factor cDNA be introduced into the plant cells, nor does it require that the introduced sequence be exactly identical to the endogenous transcription factor gene of interest. However, as with antisense suppression, the suppressive efficiency will be enhanced as specificity of hybridization is increased, e.g., as the introduced sequence is lengthened, and/or as the sequence similarity between the introduced sequence and the endogenous transcription factor gene is increased.

[0290] Vectors expressing an untranslatable form of the transcription factor mRNA, e.g., sequences comprising one or more stop codon, or nonsense mutation) can also be used to suppress expression of an endogenous transcription factor, thereby reducing or eliminating its activity and modifying one or more traits. Methods for producing such constructs are described in U.S. Pat. No. 5,583,021. Preferably, such constructs are made by introducing a premature stop codon into the transcription factor gene. Alternatively, a plant trait can be modified by gene silencing using double-strand RNA (Sharp (1999) Genes and Development 13: 139-141). Another method for abolishing the expression of a gene is by insertion mutagenesis using the T-DNA of Agrobacterium tumefaciens. After generating the insertion mutants, the mutants can be screened to identify those containing the insertion in a transcription factor or transcription factor homolog gene. Plants containing a single transgene insertion event at the desired gene can be crossed to generate homozygous plants for the mutation. Such methods are well known to those of skill in the art (See for example Koncz et al. (1992) Methods in Arabidopsis Research, World Scientific Publishing Co. Pte. Ltd., River Edge, N.J.).

[0291] Alternatively, a plant phenotype can be altered by eliminating an endogenous gene, such as a transcription factor or transcription factor homolog, e.g., by homologous recombination (Kempin et al. (1997) Nature 389: 802-803).

[0292] A plant trait can also be modified by using the Cre-lox system (for example, as described in U.S. Pat. No. 5,658,772). A plant genome can be modified to include first and second lox sites that are then contacted with a Cre recombinase. If the lox sites are in the same orientation, the intervening DNA sequence between the two sites is excised. If the lox sites are in the opposite orientation, the intervening sequence is inverted.

[0293] The polynucleotides and polypeptides of this invention can also be expressed in a plant in the absence of an expression cassette by manipulating the activity or expression level of the endogenous gene by other means, such as, for example, by ectopically expressing a gene by T-DNA activation tagging (Ichikawa et al. (1997) Nature 390 698-701; Kakimoto et al. (1996) Science 274: 982-985). This method entails transforming a plant with a gene tag containing multiple transcriptional enhancers and once the tag has inserted into the genome, expression of a flanking gene coding sequence becomes deregulated. In another example, the transcriptional machinery in a plant can be modified so as to increase transcription levels of a polynucleotide of the invention (See, e.g., PCT Publications WO 96/06166 and WO 98/53057 which describe the modification of the DNA-binding specificity of zinc finger proteins by changing particular amino acids in the DNA-binding motif).

[0294] The transgenic plant can also include the machinery necessary for expressing or altering the activity of a polypeptide encoded by an endogenous gene, for example, by altering the phosphorylation state of the polypeptide to maintain it in an activated state.

[0295] Transgenic plants (or plant cells, or plant explants, or plant tissues) incorporating the polynucleotides of the invention and/or expressing the polypeptides of the invention can be produced by a variety of well established techniques as described above. Following construction of a vector, most typically an expression cassette, including a polynucleotide, e.g., encoding a transcription factor or transcription factor homolog, of the invention, standard techniques can be used to introduce the polynucleotide into a plant, a plant cell, a plant explant or a plant tissue of interest. Optionally, the plant cell, explant or tissue can be regenerated to produce a transgenic plant.

[0296] The plant can be any higher plant, including gymnosperms, monocotyledonous and dicotyledenous plants. Suitable protocols are available for Leguminosae (alfalfa, soybean, clover, etc.), Umbelliferae (carrot, celery, parsnip), Cruciferae (cabbage, radish, rapeseed, broccoli, etc.), Curcurbitaceae (melons and cucumber), Gramineae (wheat, corn, rice, barley, millet, etc.), Solanaceae (potato, tomato, tobacco, peppers, etc.), and various other crops. See protocols described in Ammirato et al., eds., (1984) Handbook of Plant Cell Culture—Crop Species, Macmillan Publ. Co., New York, N.Y.; Shimamoto et al. (1989) Nature 338: 274-276; Fromm et al. (1990) Bio/Technol. 8: 833-839; and Vasil et al. (1990) Bio/Technol. 8: 429-434.

[0297] Transformation and regeneration of both monocotyledonous and dicotyledonous plant cells is now routine, and the selection of the most appropriate transformation technique will be determined by the practitioner. The choice of method will vary with the type of plant to be transformed; those skilled in the art will recognize the suitability of particular methods for given plant types. Suitable methods can include, but are not limited to: electroporation of plant protoplasts; liposome-mediated transformation; polyethylene glycol (PEG) mediated transformation; transformation using viruses; micro-injection of plant cells; micro-projectile bombardment of plant cells; vacuum infiltration; and Agrobacterium tumefaciens mediated transformation. Transformation means introducing a nucleotide sequence into a plant in a manner to cause stable or transient expression of the sequence.

[0298] Successful examples of the modification of plant characteristics by transformation with cloned sequences which serve to illustrate the current knowledge in this field of technology, and which are herein incorporated by reference, include: U.S. Pat. Nos. 5,571,706; 5,677,175; 5,510,471; 5,750,386; 5,597,945; 5,589,615; 5,750,871; 5,268,526; 5,780,708; 5,538,880; 5,773,269; 5,736,369 and 5,619,042.

[0299] Following transformation, plants are preferably selected using a dominant selectable marker incorporated into the transformation vector. Typically, such a marker will confer antibiotic or herbicide resistance on the transformed plants, and selection of transformants can be accomplished by exposing the plants to appropriate concentrations of the antibiotic or herbicide.

[0300] After transformed plants are selected and grown to maturity, those plants showing a modified trait are identified. The modified trait can be any of those traits described above. Additionally, to confirm that the modified trait is due to changes in expression levels or activity of the polypeptide or polynucleotide of the invention can be determined by analyzing mRNA expression using Northern blots, RT-PCR or microarrays, or protein expression using immunoblots or Western blots or gel shift assays.

Integrated Systems—Sequence Identity

[0301] Additionally, the present invention may be an integrated system, computer or computer readable medium that comprises an instruction set for determining the identity of one or more sequences in a database. In addition, the instruction set can be used to generate or identify sequences that meet any specified criteria. Furthermore, the instruction set may be used to associate or link certain functional benefits, such improved characteristics, with one or more identified sequence.

[0302] For example, the instruction set can include, e.g., a sequence comparison or other alignment program, e.g., an available program such as, for example, the Wisconsin Package Version 10.0, such as BLAST, FASTA, PILEUP, FINDPATTERNS or the like (GCG, Madison, Wis.). Public sequence databases such as GenBank, EMBL, Swiss-Prot and PIR or private sequence databases such as PHYTOSEQ sequence database (Incyte Genomics, Palo Alto, Calif.) can be searched.

[0303] Alignment of sequences for comparison can be conducted by the local homology algorithm of Smith and Waterman (1981) Adv. Appl. Math. 2: 482-489, by the homology alignment algorithm of Needleman and Wunsch (1970) J. Mol. Biol. 48: 443-453, by the search for similarity method of Pearson and Lipman (1988) Proc. Natl. Acad. Sci. 85: 2444-2448, by computerized implementations of these algorithms. After alignment, sequence comparisons between two (or more) polynucleotides or polypeptides are typically performed by comparing sequences of the two sequences over a comparison window to identify and compare local regions of sequence similarity. The comparison window can be a segment of at least about 20 contiguous positions, usually about 50 to about 200, more usually about 100 to about 150 contiguous positions. A description of the method is provided in Ausubel et al. supra.

[0304] A variety of methods for determining sequence relationships can be used, including manual alignment and computer assisted sequence alignment and analysis. This later approach is a preferred approach in the present invention, due to the increased throughput afforded by computer assisted methods. As noted above, a variety of computer programs for performing sequence alignment are available, or can be produced by one of skill.

[0305] One example algorithm that is suitable for determining percent sequence identity and sequence similarity is the BLAST algorithm, which is described in Altschul et al. (1990) J. Mol. Biol. 215: 403-410. Software for performing BLAST analyses is publicly available, e.g., through the National Library of Medicine's National Center for Biotechnology Information (ncbi.nlm.nih; see at world wide web (www) National Institutes of Health US government (gov) website). This algorithm involves first identifying high scoring sequence pairs (HSPs) by identifying short words of length W in the query sequence, which either match or satisfy some positive-valued threshold score T when aligned with a word of the same length in a database sequence. T is referred to as the neighborhood word score threshold (Altschul et al. supra). These initial neighborhood word hits act as seeds for initiating searches to find longer HSPs containing them. The word hits are then extended in both directions along each sequence for as far as the cumulative alignment score can be increased. Cumulative scores are calculated using, for nucleotide sequences, the parameters M (reward score for a pair of matching residues; always >0) and N (penalty score for mismatching residues; always <0). For amino acid sequences, a scoring matrix is used to calculate the cumulative score. Extension of the word hits in each direction are halted when: the cumulative alignment score falls off by the quantity X from its maximum achieved value; the cumulative score goes to zero or below, due to the accumulation of one or more negative-scoring residue alignments; or the end of either sequence is reached. The BLAST algorithm parameters W, T, and X determine the sensitivity and speed of the alignment. The BLASTN program (for nucleotide sequences) uses as defaults a wordlength (W) of 11, an expectation (E) of 10, a cutoff of 100, M=5, N=−4, and a comparison of both strands. For amino acid sequences, the BLASTP program uses as defaults a wordlength (W) of 3, an expectation (E) of 10, and the BLOSUM62 scoring matrix (see Henikoff and Henikoff (1992) Proc. Natl. Acad. Sci. 89: 10915-10919). Unless otherwise indicated, “sequence identity” here refers to the % sequence identity generated from a tblastx using the NCBI version of the algorithm at the default settings using gapped alignments with the filter “off” (see, for example, NIH NLM NCBI website at ncbi.nlm.nih, supra).

[0306] In addition to calculating percent sequence identity, the BLAST algorithm also performs a statistical analysis of the similarity between two sequences (see, e.g. Karlin and Altschul (1993) Proc. Natl. Acad. Sci. 90: 5873-5787). One measure of similarity provided by the BLAST algorithm is the smallest sum probability (P(N)), which provides an indication of the probability by which a match between two nucleotide or amino acid sequences would occur by chance. For example, a nucleic acid is considered similar to a reference sequence (and, therefore, in this context, homologous) if the smallest sum probability in a comparison of the test nucleic acid to the reference nucleic acid is less than about 0.1, or less than about 0.01, and or even less than about 0.001. An additional example of a useful sequence alignment algorithm is PILEUP. PILEUP creates a multiple sequence alignment from a group of related sequences using progressive, pairwise alignments. The program can align, e.g., up to 300 sequences of a maximum length of 5,000 letters.

[0307] The integrated system, or computer typically includes a user input interface allowing a user to selectively view one or more sequence records corresponding to the one or more character strings, as well as an instruction set which aligns the one or more character strings with each other or with an additional character string to identify one or more region of sequence similarity. The system may include a link of one or more character strings with a particular phenotype or gene function. Typically, the system includes a user readable output element that displays an alignment produced by the alignment instruction set.

[0308] The methods of this invention can be implemented in a localized or distributed computing environment. In a distributed environment, the methods may implemented on a single computer comprising multiple processors or on a multiplicity of computers. The computers can be linked, e.g. through a common bus, but more preferably the computer(s) are nodes on a network. The network can be a generalized or a dedicated local or wide-area network and, in certain preferred embodiments, the computers may be components of an intra-net or an internet.

[0309] Thus, the invention provides methods for identifying a sequence similar or homologous to one or more polynucleotides as noted herein, or one or more target polypeptides encoded by the polynucleotides, or otherwise noted herein and may include linking or associating a given plant phenotype or gene function with a sequence. In the methods, a sequence database is provided (locally or across an inter or intra net) and a query is made against the sequence database using the relevant sequences herein and associated plant phenotypes or gene functions.

[0310] Any sequence herein can be entered into the database, before or after querying the database. This provides for both expansion of the database and, if done before the querying step, for insertion of control sequences into the database. The control sequences can be detected by the query to ensure the general integrity of both the database and the query. As noted, the query can be performed using a web browser based interface. For example, the database can be a centralized public database such as those noted herein, and the querying can be done from a remote terminal or computer across an internet or intranet.

[0311] Any sequence herein can be used to identify a similar, homologous, paralogous, or orthologous sequence in another plant. This provides means for identifying endogenous sequences in other plants that may be useful to alter a trait of progeny plants, which results from crossing two plants of different strain. For example, sequences that encode an ortholog of any of the sequences herein that naturally occur in a plant with a desired trait can be identified using the sequences disclosed herein. The plant is then crossed with a second plant of the same species but which does not have the desired trait to produce progeny which can then be used in further crossing experiments to produce the desired trait in the second plant. Therefore the resulting progeny plant contains no transgenes; expression of the endogenous sequence may also be regulated by treatment with a particular chemical or other means, such as EMR. Some examples of such compounds well known in the art include: ethylene; cytokinins; phenolic compounds, which stimulate the transcription of the gene needed for infection; specific monosaccharides and acidic environments which potentiate vir gene induction; acidic polysaccharides which induce one or more chromosomal genes; and opines; other mechanisms include light or dark treatment (for a review of examples of such treatments, see, Winans (1992) Microbiol. Rev. 56: 12-31; Eyal et al. (1992) Plant Mol. Biol. 19: 589-599; Chrispeels et al. (2000) Plant Mol. Biol. 42: 279-290; Piazza et al. (2002) Plant Physiol. 128: 1077-1086).

[0312] Table 6 lists sequences within the UniGene database determined to be orthologous to a number of transcription factor sequences of the present invention. The column headings include the transcription factors listed by (a) the Clade Identifier (the Reference Arabidopsis sequence used to identify each clade); (b) the SEQ ID NO: of each Clade Identifier; (c) the AGI Identifier for each Clade Identifier; (d) the UniGene identifier for each orthologous sequence identified in this study; (e) the species from which the orthologs to the transcription factors are derived;; and (f) the smallest sum probability relationship of the homologous sequence to Arabidopsis Clade Identifier sequence in a given row, determined by BLAST analysis.

TABLE 6
Orthologs of Representative Arabidopsis Transcription Factor Genes Identified Using BLAST

| Clade | Clade | | | | | |
|---|---|---|---|---|---|---|
| Identifier | Identifier | | | | | |
| (Arabidopsis | SEQ ID | AGI Identifier for | | Ortholog | | |
| GID) | NO: | Clade Identifier | UniGene Identifier | SEQ ID NO: | Species | p-Value |
| 223 | G175 | AT4G26440 | Les_S5295446 | 464 | Lycopersicon | 1.00E-174 |
| | | | | | esculentum | |
| 223 | G175 | AT4G26440 | Os_S121030 | 421 | Oryza sativa | 2.00E-77 |
| 223 | G175 | AT4G26440 | SGN-UNIGENE- | 468 | Lycopersicon | 1.00E-75 |
| | | | 57877 | | esculentum | |
| 223 | G175 | AT4G26440 | Zm_S11524014 | 450 | Zea mays | 9.00E-50 |
| 223 | G175 | AT4G26440 | SGN-UNIGENE- | 467 | Lycopersicon | 7.00E-40 |
| | | | 52888 | | esculentum | |
| 223 | G175 | AT4G26440 | SGN-UNIGENE- | 466 | Lycopersicon | 6.00E-36 |
| | | | 50193 | esculentum | | |
| 223 | G175 | AT4G26440 | Os_50781 | 422 | Oryza sativa | 3.00E-19 |
| 255 | G184 | AT4G22070 | SGN-UNIGENE- | 474 | Lycopersicon | 1.00E-104 |
| | | | 47543 | | esculentum | |
| 255 | G184 | AT4G22070 | SGN-UNIGENE- | 473 | Lycopersicon | 1.00E-100 |
| | | | 47034 | | esculentum | |
| 255 | G184 | AT4G22070 | Gma_S6668474 | 435 | Glycine max | 2.00E-77 |
| 255 | G184 | AT4G22070 | SGN-UNIGENE- | 476 | Lycopersicon | 2.00E-71 |
| | | | SINGLET-18500 | | esculentum | |
| 255 | G184 | AT4G22070 | SGN-UNIGENE- | 477 | Lycopersicon | 5.00E-50 |
| | | | SINGLET-1941 | | esculentum | |
| 255 | G184 | AT4G22070 | SGN-UNIGENE- | 478 | Lycopersicon | 8.00E-37 |
| | | | SINGLET-20683 | | esculentum | |
| 255 | G184 | AT4G22070 | SGN-UNIGENE- | 475 | Lycopersicon | 5.00E-24 |
| | | | 52279 | | esculentum | |
| 255 | G184 | AT4G22070 | Gma_S4878547 | 434 | Glycine max | 2.00E-12 |
| 255 | G184 | AT4G22070 | SGN-UNIGENE- | 494 | Lycopersicon | 2.00E-11 |
| | | | SINGLET-2301 | | esculentum | |
| 255 | G184 | AT4G22070 | Hv_S119532 | 444 | Hordeum vulgare | 2.00E-10 |
| 255 | G184 | AT4G22070 | Zm_S11388469 | 452 | Zea mays | 2.00E-06 |
| 257 | G186 | AT1G62300 | SGN-UNIGENE- | 474 | Lycopersicon | 1.00E-104 |
| | | | 47543 | | esculentum | |
| 257 | G186 | AT1G62300 | SGN-UNIGENE- | 473 | Lycopersicon | 1.00E-100 |
| | | | 47034 | | esculentum | |
| 257 | G186 | AT1G62300 | Gma_S6668474 | 435 | Glycine max | 2.00E-77 |
| 257 | G186 | AT1G62300 | SGN-UNIGENE- | 476 | Lycopersicon | 2.00E-71 |
| | | | SINGLET-18500 | | esculentum | |
| 257 | G186 | AT1G62300 | SGN-UNIGENE- | 477 | Lycopersicon | 5.00E-50 |
| | | | SINGLET-1941 | | esculentum | |
| 257 | G186 | AT1G62300 | SGN-UNIGENE- | 478 | Lycopersicon | 8.00E-37 |
| | | | SINGLET-20683 | | esculentum | |
| 257 | G186 | AT1G62300 | SGN-UNIGENE- | 475 | Lycopersicon | 5.00E-24 |
| | | | 52279 | | esculentum | |
| 257 | G186 | AT1G62300 | Gma_S4878547 | 434 | Glycine max | 2.00E-12 |
| 257 | G186 | AT1G62300 | SGN-UNIGENE- | 494 | Lycopersicon | 2.00E-11 |
| | | | SINGLET-2301 | | esculentum | |
| 257 | G186 | AT1G62300 | Hv_S119532 | 444 | Hordeum vulgare | 2.00E-10 |
| 257 | G186 | AT1G62300 | Zm_S11388469 | 452 | Zea mays | 2.00E-06 |
| 259 | G353 | AT5G59820 | SGN-UNIGENE- | 470 | Lycopersicon | 6.00E-32 |
| | | | 56766 | | esculentum | |
| 259 | G353 | AT5G59820 | Gma_S4898433 | 431 | Glycine max | 3.00E-26 |
| 259 | G353 | AT5G59820 | Ta_S200273 | 456 | Triticum aestivum | 1.00E-24 |
| 259 | G353 | AT5G59820 | Os_S109163 | 423 | Oryza sativa | 2.00E-20 |
| 259 | G353 | AT5G59820 | Gma_S4973977 | 432 | Glycine max | 9.00E-17 |
| 259 | G353 | AT5G59820 | Ta_S111267 | 455 | Triticum aestivum | 3.00E-16 |
| 259 | G353 | AT5G59820 | Mtr_S5397852 | 439 | Medicago | 2.00E-14 |
| | | | | | truncatula | |
| 259 | G353 | AT5G59820 | Hv_S207187 | 443 | Hordeum vulgare | 5.00E-10 |
| 259 | G353 | AT5G59820 | Ta_S296415 | 457 | Triticum aestivum | 1.00E-05 |
| 227 | G354 | AT3G46090 | SGN-UNIGENE- | 470 | Lycopersicon | 6.00E-32 |
| | | | 56766 | | esculentum | |
| 227 | G354 | AT3G46090 | Gma_S4898433 | 431 | Glycine max | 3.00E-26 |
| 227 | G354 | AT3G46090 | Ta_S200273 | 456 | Triticum aestivum | 1 .00E-24 |
| 227 | G354 | AT3G46090 | Os_S109163 | 423 | Oryza sativa | 2.00E-20 |
| 227 | G354 | AT3G46090 | Gma_S4973977 | 432 | Glycine max | 9.00E-17 |
| 227 | G354 | AT3G46090 | Ta_S111267 | 455 | Triticum aestivum | 3.00E-16 |
| 227 | G354 | AT3G46090 | Mtr_S5397852 | 439 | Medicago | 2.00E-14 |
| | | | | | truncatula | |
| 227 | G354 | AT3G46090 | Hv_S207187 | 443 | Hordeum vulgare | 5.00E-10 |
| 227 | G354 | AT3G46090 | Ta_S296415 | 457 | Triticum aestivum | 1.00E-05 |
| 229 | G489 | AT1G08970 | Vvi_S16526885 | 498 | Vitis vinifera | 1.00E-77 |
| 229 | G489 | AT1G08970 | SGN-UNIGENE- | 471 | Lycopersicon | 4.00E-75 |
| | | | 45265 | | esculentum | |
| 229 | G489 | AT1G08970 | Mtr_S5463839 | 440 | Medicago | 6.00E-73 |
| | | | | | truncatula | |
| 229 | G489 | AT1G08970 | Les_S5293479 | 465 | Lycopersicon | 2.00E-69 |
| | | | | | esculentum | |
| 229 | G489 | AT1G08970 | Mtr_57092400 | 441 | Medicago | 9.00E-66 |
| | | | | | truncatula | |
| 229 | G489 | AT1G08970 | Pta_517047341 | 505 | Pinus taeda | 7.00E-48 |
| 229 | G489 | AT1G08970 | SGN-UNIGENE- | 472 | Lycopersicon | 2.00E-36 |
| | | | 45266 | | esculentum | |
| 229 | G489 | AT1G08970 | Os_S37232 | 424 | Oryza sativa | 5.00E-09 |
| 229 | G489 | AT1G08970 | Vvi_515374122 | 497 | Vitis vinifera | 2.00E-08 |
| 263 | G596 | AT2G45430 | Pta_S16786360 | 508 | Pinus taeda | 2.00E-70 |
| 263 | G596 | AT2G45430 | Gma_S4935598 | 436 | Glycine max | 2.00E-67 |
| 263 | G596 | AT2G45430 | Pta_S16788492 | 509 | Pinus taeda | 7.00E-63 |
| 263 | G596 | AT2G45430 | Pta_S16802054 | 510 | Pinus taeda | 1.00E-57 |
| 263 | G596 | AT2G45430 | Pta S15799222 | 507 | Pinus taeda | 6.00E-43 |
| 231 | G634 | AT1G33240 | Pta_S17050439 | 506 | Pinus taeda | 3.00E-39 |
| 231 | G634 | AT1G33240 | Zm_S11449298 | 451 | Zea mays | 3.00E-35 |
| 233 | G682 | AT4G01060 | Vvi_S15356289 | 499 | Vitis vinifera | 2.00E-30 |
| 233 | G682 | AT4G01060 | Ta_S45274 | 458 | Triticum aestivum | 3.00E-14 |
| 233 | G682 | AT4G01060 | Vvi_S16820566 | 500 | Vitis vinifera | 3.00E-12 |
| 233 | G682 | AT4G01060 | Gma_S4901946 | 433 | Glycine max | 0.004 |
| 265 | G714 | AT1G54830 | Vvi_S16526885 | 498 | Vitis vinifera | 1.00E-77 |
| 265 | G714 | AT1G54830 | SGN-UNIGENE- | 471 | Lycopersicon | 4.00E-75 |
| | | | 45265 | | esculentum | |
| 265 | G714 | AT1G54830 | Mtr_S5463839 | 440 | Medicago | 6.00E-73 |
| | | | | | truncatula | |
| 265 | G714 | AT1G54830 | Les_S5293479 | 465 | Lycopersicon | 2.00E-69 |
| | | | | | | esculentum |
| 265 | G714 | AT1G54830 | Mtr_57092400 | 441 | Medicago | 9.00E-66 |
| | | | | | truncatula | |
| 265 | G714 | AT1G54830 | Pta_517047341 | 505 | Pinus taeda | 7.00E-48 |
| 265 | G714 | AT1G54830 | SGN-UNIGENE- | 472 | Lycopersicon | 2.00E-36 |
| | | | 45266 | esculentum | | |
| 265 | G714 | AT1G54830 | Os_S37232 | 424 | Oryza sativa | 5.00E-09 |
| 267 | G877 | AT5G56270 | Les_S5295446 | 464 | Lycopersicon | 1.00E-174 |
| | | | | | esculentum | |
| 267 | G877 | AT5G56270 | Os_S121030 | 421 | Oryza sativa | 2.00E-77 |
| 267 | G877 | AT5G56270 | SGN-UNIGENE- | 468 | Lycopersicon | 1.00E-75 |
| | | | 57877 | | esculentum | |
| 267 | G877 | AT5G56270 | Zm_S11524014 | 450 | Zea mays | 9.00E-50 |
| 267 | G877 | AT5G56270 | SGN-UNIGENE- | 467 | Lycopersicon | 7.00E-40 |
| | | | 52888 | | esculentum | |
| 267 | G877 | AT5G56270 | SGN-UNIGENE- | 466 | Lycopersicon | 6.00E-36 |
| | | | 50193 | | esculentum | |
| 267 | G877 | AT5G56270 | Os_S50781 | 422 | Oryza sativa | 3.00E-19 |
| 267 | G877 | AT5G56270 | SGN-UNIGENE- | 496 | Lycopersicon | 7.00E-10 |
| | | | 56707 | | esculentum | |
| 235 | G916 | AT4G04450 | SGN-UNIGENE- | 474 | Lycopersicon | 1.00E-104 |
| | | | 47543 | | esculenturn | |
| 235 | G916 | AT4G04450 | SGN-UNIGENE- | 473 | Lycopersicon | 1.00E-100 |
| | | | 47034 | | esculentum | |
| 235 | G916 | AT4G04450 | Gma_S6668474 | 435 | Glycine max | 2.00E-77 |
| 235 | G916 | AT4G04450 | SGN-UNIGENE- | 476 | Lycopersicon | 2.00E-71 |
| | | | SINGLET-18500 | | esculentum | |
| 235 | G916 | AT4G04450 | SGN-UNIGENE- | 477 | Lycopersicon | 5.00E-50 |
| | | | SINGLET-1941 | | esculentum | |
| 235 | G916 | AT4G04450 | SGN-UNIGENE- | 478 | Lycopersicon | 8.00E-37 |
| | | | SINGLET-20683 | | esculentum | |
| 235 | G916 | AT4G04450 | SGN-UNIGENE- | 475 | Lycopersicon | 5.00E-24 |
| | | | 52279 | | esculentum | |
| 235 | G916 | AT4G04450 | Gma_S4878547 | 434 | Glycine max | 2.00E-12 |
| 235 | G916 | AT4G04450 | Hv_S119532 | 444 | Hordeum vulgare | 2.00E-10 |
| 235 | G916 | AT4G04450 | Zm_S11388469 | 452 | Zea mays | 2.00E-06 |
| 237 | G975 | AT1G15360 | SGN-UNIGENE- | 482 | Lycopersicon | 9.00E-59 |
| | | | SINGLET-335836 | | esculentum | |
| 237 | G975 | AT1G15360 | SGN-UNIGENE- | 480 | Lycopersicon | 2.00E-52 |
| | | | SiNGLET-14957 | | esculentum | |
| 239 | G1069 | AT4G14465 | SGN-UNIGENE- | 483 | Lycopersicon | 6.00E-55 |
| | | | 59076 | | esculentum | |
| 239 | G1069 | AT4G14465 | Vvi_S16805621 | 501 | Vitis vinifera | 1.00E-04 |
| 271 | G1387 | AT5G25390 | SGN-UNIGENE- | 482 | Lycopersicon | 9.00E-59 |
| | | | SINGLET-335836 | | esculentum | |
| 271 | G1387 | AT5G25390 | SGN-UNIGENE- | 480 | Lycopersicon | 2.00E-52 |
| | | | SINGLET-14957 | | esculentum | |
| 273 | G1634 | AT5G05790 | Vvi_S16872328 | 502 | Vitis vinifera | 4.00E-63 |
| 273 | G1634 | AT5G05790 | SGN-UNIGENE- | 486 | Lycopersicon | 5.00E-34 |
| | | | SINGLET-48341 | | esculentum | |
| 273 | G1634 | AT5G05790 | SGN-UNIGENE- | 485 | Lycopersicon | 4.00E-12 |
| | | | SINGLET-41892 | | esculentum | |
| 275 | G1889 | AT2G28710 | SGN-UNIGENE- | 470 | Lycopersicon | 6.00E-32 |
| | | | 56766 | | esculentum | |
| 275 | G1889 | AT2G28710 | Gma_S4898433 | 431 | Glycine max | 3.00E-26 |
| 275 | G1889 | AT2G28710 | Ta_S200273 | 456 | Triticum aestivum | 1.00E-24 |
| 275 | G1889 | AT2G28710 | Os_S109163 | 423 | Oryza sativa | 2.00E-20 |
| 275 | G1889 | AT2G28710 | Gma_S4973977 | 432 | Glycine max | 9.00E-17 |
| 275 | G1889 | AT2G28710 | Ta_S111267 | 455 | Triticum aestivum | 3.00E-16 |
| 275 | G1889 | AT2G28710 | Mtr_S5397852 | 439 | Medicago | 2.00E-14 |
| | | | | | truncatula | |
| 275 | G1889 | AT2G28710 | Hv_S207187 | 443 | Hordeum vulgare | 5.00E-10 |
| 277 | G1940 | AT5G54900 | SGN-UNIGENE- | 487 | Lycopersicon | 1.00E-144 |
| | | | 44207 | | esculentum | |
| 277 | G1940 | AT5G54900 | Zm_S11525357 | 454 | Zea mays | 1.00E-130 |
| 277 | G1940 | AT5G54900 | Zm_S11522955 | 453 | Zea mays | 1.00E-100 |
| 277 | G1940 | AT5GS4900 | Vvi_S16865171 | 503 | Vitis vinifera | 1.00E-85 |
| 277 | G1940 | AT5G54900 | Hv_S153237 | 446 | Hordeum vulgare | 9.00E-72 |
| 277 | G1940 | AT5G54900 | Ta_S152820 | 461 | Triticum aestivum | 1.00E-66 |
| 277 | G1940 | AT5G54900 | SGN-UNIGENE- | 491 | Lycopersicon | 3.00E-55 |
| | | | SINGLET-396174 | | esculentum | |
| 277 | G1940 | AT5G54900 | SGN-UNIGENE- | 490 | Lycopersicon | 4.00E-53 |
| | | | SINGLET-333119 | | esculentum | |
| 277 | G1940 | AT5GS4900 | Gma_S4975207 | 437 | Glycine max | 6.00E-51 |
| 277 | G1940 | AT5GS4900 | SGN-UNIGENE- | 489 | Lycopersicon | 1.00E-51 |
| | | | SiNGLET-17539 | | esculentum | |
| 277 | G1940 | AT5G54900 | Hv_S63965 | 447 | Hordeum vulgare | 400.E-43 |
| 277 | G1940 | AT5G54900 | SGN-UNIGENE | 448 | Lycopersicon | 200.E-43 |
| | | | 56600 | | esculentum | |
| 277 | G1940 | AT5GS4900 | Os_S32676 | 426 | Oryza sativa | 2.00E-31 |
| 277 | G1940 | AT5G54900 | Ta_S125786 | 460 | Triticum aestivum | 6.00E-26 |
| 277 | G1940 | AT5G54900 | Ta_S267457 | 462 | Triticum aestivum | 5.00E-24 |
| 277 | G1940 | AT5G54900 | Vvi_S16866336 | 504 | Vitis vinifera | 7.00E-18 |
| 277 | G1940 | AT5G54900 | Os_S75860 | 427 | Oryza sativa | 4.00E-11 |
| 277 | G1940 | AT5G54900 | SGN-UNIGENE- | 492 | Lycopersicon | 2.00E-04 |
| | | | SINGLET-49629 | | esculentum | |
| 279 | G1974 | AT3G46070 | SGN-UNIGENE- | 470 | Lycopersicon | 6.00E-32 |
| | | | 56766 | | esculentum | |
| 279 | G1974 | AT3G46070 | Gma_S4898433 | 431 | Glycine max | 3.00E-26 |
| 279 | G1974 | AT3G46070 | Ta_S200273 | 456 | Triticum aestivum | 1.00E-24 |
| 279 | G1974 | AT3G46070 | Os_S109163 | 423 | Oryza sativa | 2.00E-20 |
| 279 | G1974 | AT3G46070 | Gma_S4973977 | 432 | Glycine max | 9.00E-17 |
| 279 | G1974 | AT3G46070 | Ta_S111267 | 455 | Triticum aestivum | 3.00E-16 |
| 279 | G1974 | AT3G46070 | Mtr_S5397852 | 439 | Medicago | 2.00E-14 |
| | | | | | truncatula | |
| 279 | G1974 | AT3G46070 | Hv_S207187 | 443 | Hordeum vulgare | 5.00E-1O |
| 279 | G1974 | AT3G46070 | Ta_S296415 | 457 | Triticum aestivum | 1.00E-05 |
| 281 | G2153 | AT3G04570 | SGN-UNIGENE- | 483 | Lycopersicon | 6.00E-55 |
| | | | 59076 | | esculentum | |
| 281 | G2153 | AT3G04570 | Mtr_S5308977 | 442 | Medicago | 2.00E-31 |
| | | | | | truncatula | |
| 281 | G2153 | AT3G04570 | Hv_S52928 | 449 | Hordeum vulgare | 5 |
| 283 | G2583 | AT5G11190 | SGN-UNIGENE- | 482 | Lycopersicon | 9.00E-59 |
| | | | SINGLET-335836 | | esculentum | |
| 283 | G2583 | AT5G11190 | SGN-UNIGENE- | 480 | Lycopersicon | 2.00E-52 |
| | | | SINGLET-14957 | | esculentum | |
| 245 | G2701 | AT3G11280 | Vvi_S16872328 | 502 | Vitis vinifera | 4.00E-63 |
| 245 | G2701 | AT3G11280 | SGN-UNIGENE- | 486 | Lycopersicon | 5.00E-34 |
| | | | SINGLET-48341 | | esculentum | |
| 245 | G2701 | AT3G11280 | SGN-UNIGENE- | 485 | Lycopersicon | 4.00E-12 |
| | | | SINGLET-41892 | | esculentum | |
| 247 | G2789 | AT3G60870 | Pta_S16786360 | 508 | Pinus taeda | 2.00E-70 |
| 247 | G2789 | AT3G60870 | Gma_S4935598 | 436 | Glycine max | 2.00E-67 |
| 247 | G2789 | AT3G60870 | Pta_S16788492 | 509 | Pinus taeda | 7.00E-63 |
| 247 | G2789 | AT3G60870 | Pta_S16802054 | 510 | Pinustaeda | 1.00E-57 |
| 247 | G2789 | AT3G60870 | Pta_S15799222 | 507 | Pinus taeda | 6.00E-43 |
| 249 | G2839 | AT3G46080 | SGN-UNIGENE- | 470 | Lycopersicon | 6.00E-32 |
| | | | 56766 | | esculentum | |
| 249 | G2839 | AT3G46080 | Gma_S4898433 | 431 | Glycine max | 3.00E-26 |
| 249 | G2839 | AT3G46080 | Ta_S200273 | 456 | Triticum aestivum | 1.00E-24 |
| 249 | G2839 | AT3G46080 | Os_S109163 | 423 | Oryza sativa | 2.00E-20 |
| 249 | G2839 | AT3G46080 | Gma_S4973977 | 432 | Glycine max | 9.00E-17 |
| 249 | G2839 | AT3G46080 | Ta_S111267 | 455 | Triticum aestivum | 3.00E-16 |
| 249 | G2839 | AT3G46080 | Mtr_S5397852 | 439 | Medicago | 2.00E-14 |
| | | | | | truncatula | |
| 249 | G2839 | AT3G46080 | Hv_S207187 | 443 | Hordeum vulgare | 5.00E-10 |
| 249 | G2839 | AT3G46080 | Ta_S296415 | 457 | Triticum aestivum | 1.00E-05 |
| 251 | G2854 | AT4G27000 | SGN-UNIGENE- | 487 | Lycopersicon | 1.00E-144 |
| | | | 44207 | | esculentum | |
| 251 | G2854 | AT4G27000 | Zm_S11525357 | 454 | Zea mays | 1.00E-130 |
| 251 | G2854 | AT4G27000 | Zm_S11522955 | 453 | Zea mays | 1.00E-100 |
| 251 | G2854 | AT4G27000 | Vvi_S1686S171 | 503 | Vitis vinifera | 1.00E-85 |
| 251 | G2854 | AT4G27000 | Hv_S153237 | 446 | Hordeum vulgare | 9.00E-72 |
| 251 | G2854 | AT4G27000 | Ta_5152820 | 461 | Triticum aestivum | 1.00E-66 |
| 251 | G2854 | AT4G27000 | SGN-UNIGENE- | 491 | Lycopersicon | 3.00E-55 |
| | | | SINGLET-396174 | | esculentum | |
| 251 | G2854 | AT4G27000 | SGN-UNIGENE- | 490 | Lycopersicon | 4.00E-53 |
| | | | SINGLET-333119 | | esculentum | |
| 251 | G2854 | AT4G27000 | Gma_S4975207 | 437 | Glycine max | 6.00E-51 |
| 251 | G2854 | AT4G27000 | SGN-UNIGENE- | 489 | Lycopersicon | 1 .00E-5 1 |
| | | | SINGLET-17539 | | esculentum | |
| 251 | G2854 | AT4G27000 | Hv_S63965 | 447 | Hordeum vulgare | 4.00E-43 |
| 251 | G2854 | AT4G27000 | SGN-UNIGENE- | 488 | Lycopersicon | 2.00E-43 |
| | | | 56600 | | esculentum | |
| 251 | G2854 | AT4G27000 | Os_S32676 | 426 | Oryza sativa | 2.00E-31 |
| 251 | G2854 | AT4G27000 | Ta_S125786 | 460 | Triticum aestivum | 6.00E-26 |
| 251 | G2854 | AT4G27000 | Ta S267457 | 462 | Triticum aestivum | 5.00E-24 |
| 251 | G2854 | AT4G27000 | Vvi_516866336 | 504 | Vitis vinifera | 7.00E-18 |
| 251 | G2854 | AT4G27000 | Os_S75860 | 427 | Oryza sativa | 4.00E-1 1 |
| 251 | G2854 | AT4G27000 | SGN-UNIGENE- | 492 | Lycopersicon | 2.00E-04 |
| | | | SINGLET-49629 | | esculentum | |
| 253 | G3083 | AT3G14880 | Gma_S4880456 | 438 | Glycine max | 1.00E-25 |
| 253 | G3083 | AT3G14880 | Ta_S179586 | 463 | Triticum aestivum | 1.00E-13 |
| 253 | G3083 | AT3G14880 | Os_S54214 | 428 | Oryza sativa | 5.00E-08 |
| 253 | G3083 | AT3G14880 | Hv_S60182 | 448 | Hordeum vulgare | 3.00E-06 |

[0313] Table 7 lists the gene identification number (GID) and homologous relationships found using analyses according to the Examples for the sequences of the Sequence Listing. Those sequences listed as “reference sequences” were originally determined by experimentation to confer drought tolerance when their expression was altered. Generally, each reference sequence was used to identify the clade in which functionally related homologous sequences may be found.

TABLE 7
Homologs and Other Related Genes of Representative Arabidopsis
Transcription Factor Genes Identified using BLAST

| | | Polynucleotide | Species from Which | |
|---|---|---|---|---|
| | | (DNA) or | Homologous Sequence is | Relationship of SEQ ID NO: to |
| SEQ ID NO: | GID No: | polypeptide (PRT) | Derived | Other Genes |
| 1 | G47 | DNA | Arabidopsis thaliana | Reference sequence; predicted |
| | | | | polypeptide sequence is |
| | | | | paralogous to G2133 |
| 2 | G47 | PRT | Arabidopsis thaliana | Reference sequence; |
| | | | | paralogous to G2133 |
| 3 | G922 | DNA | Arabidopsis thaliana | Reference sequence |
| 4 | G922 | PRT | Arabidopsis thaliana | Reference sequence |
| 5 | G1274 | DNA | Arabidopsis thaliana | Reference sequence |
| 6 | G1274 | PRT | Arabidopsis thaliana | Reference sequence |
| 7 | G1792 | DNA | Arabidopsis thaliana | Reference sequence |
| 8 | G1792 | PRT | Arabidopsis thaliana | Reference sequence |
| 9 | G2053 | DNA | Arabidopsis thaliana | Reference sequence |
| 10 | G2053 | PRT | Arabidopsis thaliana | Reference sequence |
| 11 | G2133 | DNA | Arabidopsis thaliana | Reference sequence; predicted |
| | | | | polypeptide sequence is |
| | | | | paralogous to G47 |
| 12 | G2133 | PRT | Arabidopsis thaliana | Reference sequence; |
| | | | | paralogous to G47 |
| 13 | G2999 | DNA | Arabidopsis thaliana | Reference sequence |
| 14 | G2999 | PRT | Arabidopsis thaliana | Reference sequence |
| 15 | G3086 | DNA | Arabidopsis thaliana | Reference sequence |
| 16 | G3086 | PRT | Arabidopsis thaliana | Reference sequence |
| 17 | G30 | DNA | Arabidopsis thaliana | Predicted polypeptide sequence |
| | | | | is paralogous to G1792 |
| 18 | G30 | PRT | Arabidopsis thaliana | Paralogous to G1792 |
| 19 | G515 | DNA | Arabidopsis thaliana | Predicted polypeptide sequence |
| | | | | is paralogous to G2053 |
| 20 | G515 | PRT | Arabidopsis thaliana | Paralogous to G2053 |
| 21 | G516 | DNA | Arabidopsis thaliana | Predicted polypeptide sequence |
| | | | | is paralogous to G2053 |
| 22 | G516 | PRT | Arabidopsis thaliana | Paralogous to G2053 |
| 23 | G517 | DNA | Arabidopsis thaliana | Predicted polypeptide sequence |
| | | | | is paralogous to G2053 |
| 24 | G517 | PRT | Arabidopsis thaliana | Paralogous to G2053 |
| 25 | G592 | DNA | Arabidopsis thaliana | Predicted polypeptide sequence |
| | | | | is paralogous to G3086 |
| 26 | G592 | PRT | Arabidopsis thaliana | Paralogous to G3086 |
| 27 | G1134 | DNA | Arabidopsis thaliana | Predicted polypeptide sequence |
| | | | | is paralogous to G3086 |
| 28 | G1134 | PRT | Arabidopsis thaliana | Paralogous to G3086 |
| 29 | G1275 | DNA | Arabidopsis thaliana | Predicted polypeptide sequence |
| | | | | is paralogous to G1274 |
| 30 | G1275 | PRT | Arabidopsis thaliana | Paralogous to G1274 |
| 31 | G1758 | DNA | Arabidopsis thaliana | Predicted polypeptide sequence |
| | | | | is paralogous to G1274 |
| 32 | G1758 | PRT | Arabidopsis thaliana | Paralogous to G1274 |
| 33 | G1791 | DNA | Arabidopsis thaliana | Predicted polypeptide sequence |
| | | | | is paralogous to G1792 |
| 34 | G1791 | PRT | Arabidopsis thaliana | Paralogous to G1792 |
| 35 | G1795 | DNA | Arabidopsis thaliana | Predicted polypeptide sequence |
| | | | | is paralogous to G1792 |
| 36 | G1795 | PRT | Arabidopsis thaliana | Paralogous to G1792 |
| 37 | G2149 | DNA | Arabidopsis thaliana | Predicted polypeptide sequence |
| | | | | is paralogous to G3086 |
| 38 | G2149 | PRT | Arabidopsis thaliana | Paralogous to G3086 |
| 39 | G2555 | DNA | Arabidopsis thaliana | Predicted polypeptide sequence |
| | | | | is paralogous to G3086 |
| 40 | G2555 | PRT | Arabidopsis thaliana | Paralogous to G3086 |
| 41 | G2766 | DNA | Arabidopsis thaliana | Predicted polypeptide sequence |
| | | | | is paralogous to G3086 |
| 42 | G2766 | PRT | Arabidopsis thaliana | Paralogous to G3086 |
| 43 | G2989 | DNA | Arabidopsis thaliana | Predicted polypeptide sequence |
| | | | | is paralogous to G2999 |
| 44 | G2989 | PRT | Arabidopsis thaliana | Paralogous to G2999 |
| 45 | G2990 | DNA | Arabidopsis thaliana | Predicted polypeptide sequence |
| | | | | is paralogous to G2999 |
| 46 | G2990 | PRT | Arabidopsis thaliana | Paralogous to G2999 |
| 47 | G2991 | DNA | Arabidopsis thaliana | Predicted polypeptide sequence |
| | | | | is paralogous to G2999 |
| 48 | G2991 | PRT | Arabidopsis thaliana | Paralogous to G2999 |
| 49 | G2992 | DNA | Arabidopsis thaliana | Reference sequence; predicted |
| | | | | polypeptide sequence is |
| | | | | paralogous to G2999 |
| 50 | G2992 | PRT | Arabidopsis thaliana | Reference sequence; |
| | | | | paralogous to G2999 |
| 51 | G2993 | DNA | Arabidopsis thaliana | Predicted polypeptide sequence |
| | | | | is paralogous to G2999 |
| 52 | G2993 | PRT | Arabidopsis thaliana | Paralogous to G2999 |
| 53 | G2994 | DNA | Arabidopsis thaliana | Predicted polypeptide sequence |
| | | | | is paralogous to G2999 |
| 54 | G2994 | PRT | Arabidopsis thaliana | Paralogous to G2999 |
| 55 | G2995 | DNA | Arabidopsis thaliana | Predicted polypeptide sequence |
| | | | | is paralogous to G2999 |
| 56 | G2995 | PRT | Arabidopsis thaliana | Paralogous to G2999 |
| 57 | G2996 | DNA | Arabidopsis thaliana | Predicted polypeptide sequence |
| | | | | is paralogous to G2999 |
| 58 | G2996 | PRT | Arabidopsis thaliana | Paralogous to G2999 |
| 59 | G2997 | DNA | Arabidopsis thaliana | Predicted polypeptide sequence |
| | | | | is paralogous to G2999 |
| 60 | G2997 | PRT | Arabidopsis thaliana | Paralogous to G2999 |
| 61 | G2998 | DNA | Arabidopsis thaliana | Predicted polypeptide sequence |
| | | | | is paralogous to G2999 |
| 62 | G2998 | PRT | Arabidopsis thaliana | Paralogous to G2999 |
| 63 | G3000 | DNA | Arabidopsis thaliana | Predicted polypeptide sequence |
| | | | | is paralogous to G2999 |
| 64 | G3000 | PRT | Arabidopsis thaliana | Paralogous to G2999 |
| 65 | G3001 | DNA | Arabidopsis thaliana | Predicted polypeptide sequence |
| | | | | is paralogous to G2999 |
| 66 | G3001 | PRT | Arabidopsis thaliana | Paralogous to G2999 |
| 67 | G3002 | DNA | Arabidopsis thaliana | Predicted polypeptide sequence |
| | | | | is paralogous to G2999 |
| 68 | G3002 | PRT | Arabidopsis thaliana | Paralogous to G2999 |
| 69 | G3380 | DNA | Oryza sativa (japonica | Predicted polypeptide sequence |
| | | | cultivar-group) | is orthologous to G1792 |
| 70 | G3380 | PRT | Oryza sativa (japonica | Orthologous to G1792 |
| | | | cultivar-group) | |
| 71 | G3381 | DNA | Oryza sativa (japonica | Predicted polypeptide sequence |
| | | | cultivar-group) | is orthologous to G1792 |
| 72 | G3381 | PRT | Oryza sativa (japonica | Orthologous to G1792 |
| | | | cultivar-group) | |
| 73 | G3383 | DNA | Oryza sativa (japonica | Predicted polypeptide sequence |
| | | | cultivar-group) | is orthologous to G1792 |
| 74 | G3383 | PRT | Oryza sativa (japonica | Orthologous to G1792 |
| | | | cultivar-group) | |
| 75 | G3515 | DNA | Oryza sativa (japonica | Predicted polypeptide sequence |
| | | | cultivar-group) | is orthologous to G1792 |
| 76 | G3515 | PRT | Oryza sativa (japonica | Orthologous to G1792 |
| | | | cultivar-group) | |
| 77 | G3516 | DNA | Zea mays | Predicted polypeptide sequence |
| | | | | is orthologous to G1792 |
| 78 | G3516 | PRT | Zea mays | Orthologous to G1792 |
| 79 | G3517 | DNA | Zea mays | Predicted polypeptide sequence |
| | | | | is orthologous to G1792 |
| 80 | G3517 | PRT | Zea mays | Orthologous to G1792 |
| 81 | G3518 | DNA | Glycine max | Predicted polypeptide sequence |
| | | | | is orthologous to G1792 |
| 82 | G3518 | PRT | Glycine max | Orthologous to G1792 |
| 83 | G3519 | DNA | Glycine max | Predicted polypeptide sequence |
| | | | | is orthologous to G1792 |
| 84 | G3519 | PRT | Glycine max | Orthologous to G1792 |
| 85 | G3520 | DNA | Glycine max | Predicted polypeptide sequence |
| | | | | is orthologous to G1792 |
| 86 | G3520 | PRT | Glycine max | Orthologous to G1792 |
| 87 | G3643 | DNA | Glycine max | Predicted polypeptide sequence |
| | | | | is orthologous to G47 |
| 88 | G3643 | PRT | Glycine max | Orthologous to G47 |
| 89 | G3644 | DNA | Oryza sativa (japonica | Predicted polypeptide sequence |
| | | | cultivar-group) | is orthologous to G47 |
| 90 | G3644 | PRT | Oryza sativa (japonica | Orthologous to G47 |
| | | | cultivar-group) | |
| 91 | G3645 | DNA | Brassica rapa subsp. | Predicted polypeptide sequence |
| | | | Pekinensis | is orthologous to G47 |
| 92 | G3645 | PRT | Brassica rapa subsp. | Orthologous to G47 |
| | | | Pekinensis | |
| 93 | G3646 | DNA | Brassica oleracea | Predicted polypeptide sequence |
| | | | | is orthologous to G47 |
| 94 | G3646 | PRT | Brassica oleracea | Orthologous to G47 |
| 95 | G3647 | DNA | Zinnia elegans | Predicted polypeptide sequence |
| | | | | is orthologous to G47 |
| 96 | G3647 | PRT | Zinnia elegans | Orthologous to G47 |
| 97 | G3649 | DNA | Oryza sativa (japonica | Predicted polypeptide sequence |
| | | | cultivar-group) | is orthologous to G47 |
| 98 | G3649 | PRT | Oryza sativa (japonica | Orthologous to G47 |
| | | | cultivar-group) | |
| 99 | G3651 | DNA | Oryza sativa (japonica | Predicted polypeptide sequence |
| | | | cultivar-group) | is orthologous to G47 |
| 100 | G3651 | PRT | Oryza sativa (japonica | Orthologous to G47 |
| | | | cultivar-group) | |
| 101 | G3663 | DNA | Lotus corniculatus var. | Predicted polypeptide sequence |
| | | | japonicus | is orthologous to G2999 |
| 102 | G3663 | PRT | Lotus corniculatus var. | Orthologous to G2999 |
| | | | japonicus | |
| 103 | G3668 | DNA | Flaveria bidentis | Predicted polypeptide sequence |
| | | | | is orthologous to G2999 |
| 104 | G3668 | PRT | Flaveria bidentis | Orthologous to G2999 |
| 105 | G3670 | DNA | Lotus corniculatus var. | Predicted polypeptide sequence |
| | | | japonicus | is orthologous to G2999 |
| 106 | G3670 | PRT | Lotus corniculatus var. | Orthologous to G2999 |
| | | | japonicus | |
| 107 | G3671 | DNA | Oryza sativa (japonica | Predicted polypeptide sequence |
| | | | cultivar-group) | is orthologous to G2999 |
| 108 | G3671 | PRT | Oryza sativa (japonica | Orthologous to G2999 |
| | | | cultivar-group) | |
| 109 | G3674 | DNA | Oryza sativa (indica | Predicted polypeptide sequence |
| | | | cultivar-group) | is orthologous to G2999 |
| 110 | G3674 | PRT | Oryza sativa (indica | Orthologous to G2999 |
| | | | cultivar-group) | |
| 111 | G3675 | DNA | Brassica napus | Predicted polypeptide sequence |
| | | | | is orthologous to G2999 |
| 112 | G3675 | PRT | Brassica napus | Orthologous to G2999 |
| 113 | G3680 | DNA | Zea mays | Predicted polypeptide sequence |
| | | | | is orthologous to G2999 |
| 114 | G3680 | PRT | Zea mays | Orthologous to G2999 |
| 115 | G3683 | DNA | Oryza sativa (japonica | Predicted polypeptide sequence |
| | | | cultivar-group) | is orthologous to G2999 |
| 116 | G3683 | PRT | Oryza sativa (japonica | Orthologous to G2999 |
| | | | cultivar-group) | |
| 117 | G3685 | DNA | Oryza sativa (japonica | Predicted polypeptide sequence |
| | | | cultivar-group) | is orthologous to G2999 |
| 118 | G3685 | PRT | Oryza sativa (japonica | Orthologous to G2999 |
| | | | cultivar-group) | |
| 119 | G3686 | DNA | Oryza sativa (indica | Predicted polypeptide sequence |
| | | | cultivar-group) | is orthologous to G2999 |
| 120 | G3686 | PRT | Oryza sativa (indica | Orthologous to G2999 |
| | | | cultivar-group) | |
| 121 | G3690 | DNA | Oryza sativa (japonica | Predicted polypeptide sequence |
| | | | cultivar-group) | is orthologous to G2999 |
| 122 | G3690 | PRT | Oryza sativa (japonica | Orthologous to G2999 |
| | | | cultivar-group) | |
| 123 | G3692 | DNA | Oryza sativa (japonica | Predicted polypeptide sequence |
| | | | cultivar-group) | is orthologous to G2999 |
| 124 | G3692 | PRT | Oryza sativa (japonica | Orthologous to G2999 |
| | | | cultivar-group) | |
| 125 | G3694 | DNA | Oryza sativa (japonica | Predicted polypeptide sequence |
| | | | cultivar-group) | is orthologous to G2999 |
| 126 | G3694 | PRT | Oryza sativa (japonica | Orthologous to G2999 |
| | | | cultivar-group) | |
| 127 | G3695 | DNA | Oryza sativa (japonica | Predicted polypeptide sequence |
| | | | cultivar-group) | is orthologous to G2999 |
| 128 | G3695 | PRT | Oryza sativa (japonica | Orthologous to G2999 |
| | | | cultivar-group) | |
| 129 | G3719 | DNA | Zea mays | Predicted polypeptide sequence |
| | | | | is orthologous to G1274 |
| 130 | G3719 | PRT | Zea mays | Orthologous to G1274 |
| 131 | G3720 | DNA | Zea mays | Predicted polypeptide sequence |
| | | | | is orthologous to G1274 |
| 132 | G3720 | PRT | Zea mays | Orthologous to G1274 |
| 133 | G3721 | DNA | Oryza sativa (japonica | Predicted polypeptide sequence |
| | | | cultivar-group) | is orthologous to G1274 |
| 134 | G3721 | PRT | Oryza sativa (japonica | Orthologous to G1274 |
| | | | cultivar-group) | |
| 135 | G3722 | DNA | Zea mays | Predicted polypeptide sequence |
| | | | | is orthologous to G1274 |
| 136 | G3722 | PRT | Zea mays | Orthologous to G1274 |
| 137 | G3723 | DNA | Glycine max | Predicted polypeptide sequence |
| | | | | is orthologous to G1274 |
| 138 | G3723 | PRT | Glycine max | Orthologous to G1274 |
| 139 | G3724 | DNA | Glycine max | Predicted polypeptide sequence |
| | | | | is orthologous to G1274 |
| 140 | G3724 | PRT | Glycine max | Orthologous to G1274 |
| 141 | G3725 | DNA | Oryza sativa (japonica | Predicted polypeptide sequence |
| | | | cultivar-group) | is orthologous to G1274 |
| 142 | G3725 | PRT | Oryza sativa (japonica | Orthologous to G1274 |
| | | | cultivar-group) | |
| 143 | G3726 | DNA | Oryza sativa (japonica | Predicted polypeptide sequence |
| | | | cultivar-group) | is orthologous to G1274 |
| 144 | G3726 | PRT | Oryza sativa (japonica | Orthologous to G1274 |
| | | | cultivar-group) | |
| 145 | G3727 | DNA | Zea mays | Predicted polypeptide sequence |
| | | | | is orthologous to G1274 |
| 146 | G3727 | PRT | Zea mays | Orthologous to G1274 |
| 147 | G3728 | DNA | Zea mays | Predicted polypeptide sequence |
| | | | | is orthologous to G1274 |
| 148 | G3728 | PRT | Zea mays | Orthologous to G1274 |
| 149 | G3729 | DNA | Oryza sativa (japonica | Predicted polypeptide sequence |
| | | | cultivar-group) | is orthologous to G1274 |
| 150 | G3729 | PRT | Oryza sativa (japonica | Orthologous to G1274 |
| | | | cultivar-group) | |
| 151 | G3730 | DNA | Oryza sativa (japonica | Predicted polypeptide sequence |
| | | | cultivar-group) | is orthologous to G1274 |
| 152 | G3730 | PRT | Oryza sativa (japonica | Orthologous to G1274 |
| | | | cultivar-group) | |
| 153 | G3731 | DNA | Lycopersicon esculentum | Predicted polypeptide sequence |
| | | | | is orthologous to G1274 |
| 154 | G3731 | PRT | Lycopersicon esculentum | Orthologous to G1274 |
| 155 | G3732 | DNA | Solanum tuberosum | Predicted polypeptide sequence |
| | | | | is orthologous to G1274 |
| 156 | G3732 | PRT | Solanum tuberosum | Orthologous to G1274 |
| 157 | G3733 | DNA | Hordeum vulgare | Predicted polypeptide sequence |
| | | | | is orthologous to G1274 |
| 158 | G3733 | PRT | Hordeum vulgare | Orthologous to G1274 |
| 159 | G3735 | DNA | Medicago truncatula | Predicted polypeptide sequence |
| | | | | is orthologous to G1792 |
| 160 | G3735 | PRT | Medicago truncatula | Orthologous to G1792 |
| 161 | G3736 | DNA | Triticum aestivum | Predicted polypeptide sequence |
| | | | | is orthologous to G1792 |
| 162 | G3736 | PRT | Triticum aestivum | Orthologous to G1792 |
| 163 | G3737 | DNA | Oryza sativa (japonica | Predicted polypeptide sequence |
| | | | cultivar-group) | is orthologous to G1792 |
| 164 | G3737 | PRT | Oryza sativa (japonica | Orthologous to G1792 |
| | | | cultivar-group) | |
| 165 | G3739 | DNA | Zea mays | Predicted polypeptide sequence |
| | | | | is orthologous to G1792 |
| 166 | G3739 | PRT | Zea mays | Orthologous to G1792 |
| 167 | G3740 | DNA | Oryza sativa (japonica | Predicted polypeptide sequence |
| | | | cultivar-group) | is orthologous to G3086 |
| 168 | G3740 | PRT | Oryza sativa (japonica | Orthologous to G3086 |
| | | | cultivar-group) | |
| 169 | G3741 | DNA | Oryza sativa (japonica | Predicted polypeptide sequence |
| | | | cultivar-group) | is orthologous to G3086 |
| 170 | G3741 | PRT | Oryza sativa (japonica | Orthologous to G3086 |
| | | | cultivar-group) | |
| 171 | G3742 | DNA | Oryza sativa (japonica | Predicted polypeptide sequence |
| | | | cultivar-group) | is orthologous to G3086 |
| 172 | G3742 | PRT | Oryza sativa (japonica | Orthologous to G3086 |
| | | | cultivar-group) | |
| 173 | G3744 | DNA | Oryza sativa (japonica | Predicted polypeptide sequence |
| | | | cultivar-group) | is orthologous to G3086 |
| 174 | G3744 | PRT | Oryza sativa (japonica | Orthologous to G3086 |
| | | | cultivar-group) | |
| 175 | G3746 | DNA | Oryza sativa (japonica | Predicted polypeptide sequence |
| | | | cultivar-group) | is orthologous to G3086 |
| 176 | G3746 | PRT | Oryza sativa (japonica | Orthologous to G3086 |
| | | | cultivar-group) | |
| 177 | G3755 | DNA | Zea mays | Predicted polypeptide sequence |
| | | | | is orthologous to G3086 |
| 178 | G3755 | PRT | Zea mays | Orthologous to G3086 |
| 179 | G3763 | DNA | Glycine max | Predicted polypeptide sequence |
| | | | | is orthologous to G3086 |
| 180 | G3763 | PRT | Glycine max | Orthologous to G3086 |
| 181 | G3764 | DNA | Glycine max | Predicted polypeptide sequence |
| | | | | is orthologous to G3086 |
| 182 | G3764 | PRT | Glycine max | Orthologous to G3086 |
| 183 | G3765 | DNA | Glycine max | Predicted polypeptide sequence |
| | | | | is orthologous to G3086 |
| 184 | G3765 | PRT | Glycine max | Orthologous to G3086 |
| 185 | G3766 | DNA | Glycine max | Predicted polypeptide sequence |
| | | | | is orthologous to G3086 |
| 186 | G3766 | PRT | Glycine max | Orthologous to G3086 |
| 187 | G3767 | DNA | Glycine max | Predicted polypeptide sequence |
| | | | | is orthologous to G3086 |
| 188 | G3767 | PRT | Glycine max | Orthologous to G3086 |
| 189 | G3768 | DNA | Glycine max | Predicted polypeptide sequence |
| | | | | is orthologous to G3086 |
| 190 | G3768 | PRT | Glycine max | Orthologous to G3086 |
| 191 | G3769 | DNA | Glycine max | Predicted polypeptide sequence |
| | | | | is orthologous to G3086 |
| 192 | G3769 | PRT | Glycine max | Orthologous to G3086 |
| 193 | G3771 | DNA | Glycine max | Predicted polypeptide sequence |
| | | | | is orthologous to G3086 |
| 194 | G3771 | PRT | Glycine max | Orthologous to G3086 |
| 195 | G3772 | DNA | Glycine max | Predicted polypeptide sequence |
| | | | | is orthologous to G3086 |
| 196 | G3772 | PRT | Glycine max | Orthologous to G3086 |
| 197 | G3782 | DNA | Pinus taeda | Predicted polypeptide sequence |
| | | | | is orthologous to G3086 |
| 198 | G3782 | PRT | Pinus taeda | Orthologous to G3086 |
| 199 | G3794 | DNA | Zea mays | Predicted polypeptide sequence |
| | | | | is orthologous to G1792 |
| 200 | G3794 | PRT | Zea mays | Orthologous to G1792 |
| 201 | G3795 | DNA | Capsicum annuum | Predicted polypeptide sequence |
| | | | | is orthologous to G1274 |
| 202 | G3795 | PRT | Capsicum annuum | Orthologous to G1274 |
| 203 | G3797 | DNA | Lactuca sativa | Predicted polypeptide sequence |
| | | | | is orthologous to G1274 |
| 204 | G3797 | PRT | Lactuca sativa | Orthologous to G1274 |
| 205 | G3802 | DNA | Sorghum bicolor | Predicted polypeptide sequence |
| | | | | is orthologous to G1274 |
| 206 | G3802 | PRT | Sorghum bicolor | Orthologous to G1274 |
| 207 | G3803 | DNA | Glycine max | Predicted polypeptide sequence |
| | | | | is orthologous to G1274 |
| 208 | G3803 | PRT | Glycine max | Orthologous to G1274 |
| 209 | G3804 | DNA | Zea mays | Predicted polypeptide sequence |
| | | | | is orthologous to G1274 |
| 210 | G3804 | PRT | Zea mays | Orthologous to G1274 |
| 211 | G3810 | DNA | Glycine max | Predicted polypeptide sequence |
| | | | | is orthologous to G922 |
| 212 | G3810 | PRT | Glycine max | Orthologous to G922 |
| 213 | G3811 | DNA | Glycine max | Predicted polypeptide sequence |
| | | | | is orthologous to G922 |
| 214 | G3811 | PRT | Glycine max | Orthologous to G922 |
| 215 | G3813 | DNA | Oryza sativa (japonica | Predicted polypeptide sequence |
| | | | cultivar-group) | is orthologous to G922 |
| 216 | G3813 | PRT | Oryza sativa (japonica | Orthologous to G922 |
| | | | cultivar-group) | |
| 217 | G3814 | DNA | Oryza sativa (japonica | Predicted polypeptide sequence |
| | | | cultivar-group) | is orthologous to G922 |
| 218 | G3814 | PRT | Oryza sativa (japonica | Orthologous to G922 |
| | | | cultivar-group) | |
| 219 | G3824 | DNA | Lycopersicon esculentum | Predicted polypeptide sequence |
| | | | | is orthologous to G922 |
| 220 | G3824 | PRT | Lycopersicon esculentum | Orthologous to G922 |
| 221 | G3827 | DNA | Oryza sativa (japonica | Predicted polypeptide sequence |
| | | | cultivar-group) | is orthologous to G922 |
| 222 | G3827 | PRT | Oryza sativa (japonica | Orthologous to G922 |
| | | | cultivar-group) | |
| 223 | G175 | DNA | Arabidopsis thaliana | Reference sequence |
| 224 | G175 | PRT | Arabidopsis thaliana | Reference sequence |
| 225 | G303 | DNA | Arabidopsis thaliana | Reference sequence |
| 226 | G303 | PRT | Arabidopsis thaliana | Reference sequence |
| 227 | G354 | DNA | Arabidopsis thaliana | Reference sequence |
| 228 | G354 | PRT | Arabidopsis thaliana | Reference sequence |
| 229 | G489 | DNA | Arabidopsis thaliana | Reference sequence |
| 230 | G489 | PRT | Arabidopsis thaliana | Reference sequence |
| 231 | G634 | DNA | Arabidopsis thaliana | Reference sequence |
| 232 | G634 | PRT | Arabidopsis thaliana | Reference sequence |
| 233 | G682 | DNA | Arabidopsis thaliana | Reference sequence |
| 234 | G682 | PRT | Arabidopsis thaliana | Reference sequence |
| 235 | G916 | DNA | Arabidopsis thaliana | Reference sequence |
| 236 | G916 | PRT | Arabidopsis thaliana | Reference sequence |
| 237 | G975 | DNA | Arabidopsis thaliana | Reference sequence; predicted |
| | | | | polypeptide sequence is |
| | | | | paralogous to G2583 |
| 238 | G975 | PRT | Arabidopsis thaliana | Reference sequence; |
| | | | | paralogous to G2583 |
| 239 | G1069 | DNA | Arabidopsis thaliana | Reference sequence; |
| | | | | functionally related, |
| | | | | homologous to G1073 |
| 240 | G1069 | PRT | Arabidopsis thaliana | Reference sequence; |
| | | | | functionally related, |
| | | | | homologous to G1073 |
| 241 | G1452 | DNA | Arabidopsis thaliana | Reference sequence; |
| | | | | functionally related, |
| | | | | homologous to G512 |
| 242 | G1452 | PRT | Arabidopsis thaliana | Reference sequence; |
| | | | | functionally related, |
| | | | | homologous to G512 |
| 243 | G1820 | DNA | Arabidopsis thaliana | Reference sequence |
| 244 | G1820 | PRT | Arabidopsis thaliana | Reference sequence |
| 245 | G2701 | DNA | Arabidopsis thaliana | Reference sequence; predicted |
| | | | | polypeptide sequence is |
| | | | | paralogous to G1634 |
| 246 | G2701 | PRT | Arabidopsis thaliana | Reference sequence; |
| | | | | paralogous to G1634 |
| 247 | G2789 | DNA | Arabidopsis thaliana | Reference sequence; predicted |
| | | | | polypeptide sequence is |
| | | | | paralogous to G596 |
| 248 | G2789 | PRT | Arabidopsis thaliana | Reference sequence; |
| | | | | paralogous to G596 |
| 249 | G2839 | DNA | Arabidopsis thaliana | Reference sequence; predicted |
| | | | | polypeptide sequence is |
| | | | | paralogous to G354 |
| 250 | G2839 | PRT | Arabidopsis thaliana | Reference sequence; |
| | | | | paralogous to G354 |
| 251 | G2854 | DNA | Arabidopsis thaliana | Reference sequence; predicted |
| | | | | polypeptide sequence is |
| | | | | paralogous to G1940 |
| 252 | G2854 | PRT | Arabidopsis thaliana | Reference sequence; |
| | | | | paralogous to G1940 |
| 253 | G3083 | DNA | Arabidopsis thaliana | Reference sequence |
| 254 | G3083 | PRT | Arabidopsis thaliana | Reference sequence |
| 255 | G184 | DNA | Arabidopsis thaliana | Predicted polypeptide sequence |
| | | | | is paralogous to G916 |
| 256 | G184 | PRT | Arabidopsis thaliana | Paralogous to G916 |
| 257 | G186 | DNA | Arabidopsis thaliana | Predicted polypeptide sequence |
| | | | | is paralogous to G916 |
| 258 | G186 | PRT | Arabidopsis thaliana | Paralogous to G916 |
| 259 | G353 | DNA | Arabidopsis thaliana | Predicted polypeptide sequence |
| | | | | is paralogous to G354 |
| 260 | G353 | PRT | Arabidopsis thaliana | Paralogous to G354 |
| 261 | G512 | DNA | Arabidopsis thaliana | Predicted polypeptide sequence |
| | | | | is paralogous to G1452 |
| 262 | G512 | PRT | Arabidopsis thaliana | Paralogous to G1452 |
| 263 | G596 | DNA | Arabidopsis thaliana | Predicted polypeptide sequence |
| | | | | is paralogous to G2789 |
| 264 | G596 | PRT | Arabidopsis thaliana | Paralogous to G2789 |
| 265 | G714 | DNA | Arabidopsis thaliana | Predicted polypeptide sequence |
| | | | | is paralogous to G489 |
| 266 | G714 | PRT | Arabidopsis thaliana | Paralogous to G489 |
| 267 | G877 | DNA | Arabidopsis thaliana | Predicted polypeptide sequence |
| | | | | is paralogous to G175 |
| 268 | G877 | PRT | Arabidopsis thaliana | Paralogous to G175 |
| 269 | G1357 | DNA | Arabidopsis thaliana | Predicted polypeptide sequence |
| | | | | is paralogous to G1452 |
| 270 | G1357 | PRT | Arabidopsis thaliana | Paralogous to G1452 |
| 271 | G1387 | DNA | Arabidopsis thaliana | Predicted polypeptide sequence |
| | | | | is paralogous to G975 |
| 272 | G1387 | PRT | Arabidopsis thaliana | Paralogous to G975 |
| 273 | G1634 | DNA | Arabidopsis thaliana | Predicted polypeptide sequence |
| | | | | is paralogous to G2701 |
| 274 | G1634 | PRT | Arabidopsis thaliana | Paralogous to G2701 |
| 275 | G1889 | DNA | Arabidopsis thaliana | Predicted polypeptide sequence |
| | | | | is paralogous to G354 |
| 276 | G1889 | PRT | Arabidopsis thaliana | Paralogous to G354 |
| 277 | G1940 | DNA | Arabidopsis thaliana | Predicted polypeptide sequence |
| | | | | is paralogous to G2854 |
| 278 | G1940 | PRT | Arabidopsis thaliana | Paralogous to G2854 |
| 279 | G1974 | DNA | Arabidopsis thaliana | Predicted polypeptide sequence |
| | | | | is paralogous to G354 |
| 280 | G1974 | PRT | Arabidopsis thaliana | Paralogous to G354 |
| 281 | G2153 | DNA | Arabidopsis thaliana | Predicted polypeptide sequence |
| | | | | is paralogous to G1073 |
| 282 | G2153 | PRT | Arabidopsis thaliana | Paralogous to G1073 |
| 283 | G2583 | DNA | Arabidopsis thaliana | Predicted polypeptide sequence |
| | | | | is paralogous to G975 |
| 284 | G2583 | PRT | Arabidopsis thaliana | Paralogous to G975 |
| 287 | G226 | DNA | Arabidopsis thaliana | Reference sequence; predicted |
| | | | | polypeptide sequence is |
| | | | | paralogous to G682 |
| 288 | G226 | PRT | Arabidopsis thaliana | Reference sequence; |
| | | | | paralogous to G682 |
| 289 | G481 | DNA | Arabidopsis thaliana | Reference sequence; predicted |
| | | | | polypeptide sequence is |
| | | | | paralogous to G482 |
| 290 | G481 | PRT | Arabidopsis thaliana | Reference sequence; |
| | | | | paralogous to G482 |
| 291 | G482 | DNA | Arabidopsis thaliana | Reference sequence; predicted |
| | | | | polypeptide sequence is |
| | | | | paralogous to G481 |
| 292 | G482 | PRT | Arabidopsis thaliana | Reference sequence; |
| | | | | paralogous to G481 |
| 293 | G485 | DNA | Arabidopsis thaliana | Predicted polypeptide sequence |
| | | | | is paralogous to G481 and |
| | | | | G482 |
| 294 | G485 | PRT | Arabidopsis thaliana | Paralogous to G481 and G482 |
| 295 | G486 | DNA | Arabidopsis thaliana | Functionally related and |
| | | | | homologous to G481 and G482 |
| 296 | G486 | PRT | Arabidopsis thaliana | Functionally related and |
| | | | | homologous to G481 and G482 |
| 297 | G1067 | DNA | Arabidopsis thaliana | Predicted polypeptide sequence |
| | | | | is paralogous to G1073 |
| 298 | G1067 | PRT | Arabidopsis thaliana | Paralogous to G1073 |
| 299 | G1070 | DNA | Arabidopsis thaliana | Functionally related and |
| | | | | homologous to G1073 |
| 300 | G1070 | PRT | Arabidopsis thaliana | Functionally related and |
| | | | | homologous to G1073 |
| 301 | G1073 | DNA | Arabidopsis thaliana | Reference sequence |
| 302 | G1073 | PRT | Arabidopsis thaliana | Reference sequence |
| 303 | G1075 | DNA | Arabidopsis thaliana | Functionally related and |
| | | | | homologous to G1073 |
| 304 | G1075 | PRT | Arabidopsis thaliana | Functionally related and |
| | | | | homologous to G1073 |
| 305 | G1076 | DNA | Arabidopsis thaliana | Functionally related and |
| | | | | homologous to G1073 |
| 306 | G1076 | PRT | Arabidopsis thaliana | Functionally related and |
| | | | | homologous to G1073 |
| 307 | G1248 | DNA | Arabidopsis thaliana | Functionally related and |
| | | | | homologous to G481 and G482 |
| 308 | G1248 | PRT | Arabidopsis thaliana | Functionally related and |
| | | | | homologous to G481 and G482 |
| 309 | G1364 | DNA | Arabidopsis thaliana | Predicted polypeptide sequence |
| | | | | is paralogous to G481 and |
| | | | | G482 |
| 310 | G1364 | PRT | Arabidopsis thaliana | Paralogous to G481 and G482 |
| 311 | G1781 | DNA | Arabidopsis thaliana | Functionally related and |
| | | | | homologous to G481 and G482 |
| 312 | G1781 | PRT | Arabidopsis thaliana | Functionally related and |
| | | | | homologous to G481 and G482 |
| 313 | G1816 | DNA | Arabidopsis thaliana | Predicted polypeptide sequence |
| | | | | is paralogous to G226 and |
| | | | | G682 |
| 314 | G1816 | PRT | Arabidopsis thaliana | Paralogous to G226 and G682 |
| 315 | G1945 | DNA | Arabidopsis thaliana | Functionally related and |
| | | | | homologous to G1073 |
| 316 | G1945 | PRT | Arabidopsis thaliana | Functionally related and |
| | | | | homologous to G1073 |
| 317 | G2155 | DNA | Arabidopsis thaliana | Functionally related and |
| | | | | homologous to G1073 |
| 318 | G2155 | PRT | Arabidopsis thaliana | Functionally related and |
| | | | | homologous to G1073 |
| 319 | G2156 | DNA | Arabidopsis thaliana | Predicted polypeptide sequence |
| | | | | is paralogous to G1073 |
| 320 | G2156 | PRT | Arabidopsis thaliana | Paralogous to G1073 |
| 321 | G2345 | DNA | Arabidopsis thaliana | Predicted polypeptide sequence |
| | | | | is paralogous to G481 and |
| | | | | G482 |
| 322 | G2345 | PRT | Arabidopsis thaliana | Paralogous to G481 and G482 |
| 323 | G2657 | DNA | Arabidopsis thaliana | Functionally related and |
| | | | | homologous to G1073 |
| 324 | G2657 | PRT | Arabidopsis thaliana | Functionally related and |
| | | | | homologous to G1073 |
| 325 | G2718 | DNA | Arabidopsis thaliana | Predicted polypeptide sequence |
| | | | | is paralogous to G481 and |
| | | | | G482 |
| 326 | G2718 | PRT | Arabidopsis thaliana | Paralogous to G481 and G482 |
| 327 | G3392 | DNA | Oryza sativa (japonica | Predicted polypeptide sequence |
| | | | cultivar-group) | is orthologous to G682 |
| 328 | G3392 | PRT | Oryza sativa (japonica | Orthologous to G682 |
| | | | cultivar-group) | |
| 329 | G3393 | DNA | Oryza sativa (japonica | Predicted polypeptide sequence |
| | | | cultivar-group) | is orthologous to G682 |
| 330 | G3393 | PRT | Oryza sativa (japonica | Orthologous to G682 |
| | | | cultivar-group) | |
| 331 | G3394 | DNA | Oryza sativa (japonica | Predicted polypeptide sequence |
| | | | cultivar-group) | is orthologous to G481 and |
| | | | | G482 |
| 332 | G3394 | PRT | Oryza sativa (japonica | Orthologous to G481 and G482 |
| | | | cultivar-group) | |
| 333 | G3395 | DNA | Oryza sativa (japonica | Predicted polypeptide sequence |
| | | | cultivar-group) | is orthologous to G481 and |
| | | | | G482 |
| 334 | G3395 | PRT | Oryza sativa (japonica | Orthologous to G481 and G482 |
| | | | cultivar-group) | |
| 335 | G3396 | DNA | Oryza sativa (japonica | Predicted polypeptide sequence |
| | | | cultivar-group) | is orthologous to G481 and |
| | | | | G482 |
| 336 | G3396 | PRT | Oryza sativa (japonica | Orthologous to G481 and G482 |
| | | | cultivar-group) | |
| 337 | G3397 | DNA | Oryza sativa (japonica | Predicted polypeptide sequence |
| | | | cultivar-group) | is orthologous to G481 and |
| | | | | G482 |
| 338 | G3397 | PRT | Oryza sativa (japonica | Orthologous to G481 and G482 |
| | | | cultivar-group) | |
| 339 | G3398 | DNA | Oryza sativa (japonica | Predicted polypeptide sequence |
| | | | cultivar-group) | is orthologous to G481 and |
| | | | | G482 |
| 340 | G3398 | PRT | Oryza sativa (japonica | Orthologous to G481 and G482 |
| | | | cultivar-group) | |
| 341 | G3399 | DNA | Oryza sativa (japonica | Predicted polypeptide sequence |
| | | | cultivar-group) | is orthologous to G1073 |
| 342 | G3399 | PRT | Oryza sativa (japonica | Orthologous to G1073 |
| | | | cultivar-group) | |
| 343 | G3400 | DNA | Oryza sativa (japonica | Predicted polypeptide sequence |
| | | | cultivar-group) | is orthologous to G1073 |
| 344 | G3400 | PRT | Oryza sativa (japonica | Orthologous to G1073 |
| | | | cultivar-group) | |
| 345 | G3401 | DNA | Oryza sativa (japonica | Predicted polypeptide sequence |
| | | | cultivar-group) | is orthologous to G1073 |
| 346 | G3401 | PRT | Oryza sativa (japonica | Orthologous to G1073 |
| | | | cultivar-group) | |
| 347 | G3403 | DNA | Oryza sativa (japonica | Predicted polypeptide sequence |
| | | | cultivar-group) | is orthologous to G1073 |
| 348 | G3403 | PRT | Oryza sativa (japonica | Orthologous to G1073 |
| | | | cultivar-group) | |
| 349 | G3404 | DNA | Oryza sativa (japonica | Functionally related and |
| | | | cultivar-group) | homologous to G1073 |
| 350 | G3404 | PRT | Oryza sativa (japonica | Functionally related and |
| | | | cultivar-group) | homologous to G1073 |
| 351 | G3405 | DNA | Oryza sativa (japonica | Functionally related and |
| | | | cultivar-group) | homologous to G1073 |
| 352 | G3405 | PRT | Oryza sativa (japonica | Functionally related and |
| | | | cultivar-group) | homologous to G1073 |
| 353 | G3406 | DNA | Oryza sativa (japonica | Functionally related and |
| | | | cultivar-group) | homologous to G1073 |
| 354 | G3406 | PRT | Oryza sativa (japonica | Functionally related and |
| | | | cultivar-group) | homologous to G1073 |
| 355 | G3407 | DNA | Oryza sativa (japonica | Functionally related and |
| | | | cultivar-group) | homologous to G1073 |
| 356 | G3407 | PRT | Oryza sativa (japonica | Functionally related and |
| | | | cultivar-group) | homologous to G1073 |
| 357 | G3408 | DNA | Oryza sativa (japonica | Functionally related and |
| | | | cultivar-group) | homologous to G1073 |
| 358 | G3408 | PRT | Oryza sativa (japonica | Functionally related and |
| | | | cultivar-group) | homologous to G1073 |
| 359 | G3429 | DNA | Oryza sativa (japonica | Predicted polypeptide sequence |
| | | | cultivar-group) | is orthologous to G481 and |
| | | | | G482 |
| 360 | G3429 | PRT | Oryza sativa (japonica | Orthologous to G481 and G482 |
| | | | cultivar-group) | |
| 361 | G3431 | DNA | Zea mays | Predicted polypeptide sequence |
| | | | | is orthologous to G682 |
| 362 | G3431 | PRT | Zea mays | Orthologous to G682 |
| 363 | G3434 | DNA | Zea mays | Predicted polypeptide sequence |
| | | | | is orthologous to G481 and |
| | | | | G482 |
| 364 | G3434 | PRT | Zea mays | Orthologous to G481 and G482 |
| 365 | G3435 | DNA | Zea mays | Predicted polypeptide sequence |
| | | | | is orthologous to G481 and |
| | | | | G482 |
| 366 | G3435 | PRT | Zea mays | Orthologous to G481 and G482 |
| 367 | G3436 | DNA | Zea mays | Predicted polypeptide sequence |
| | | | | is orthologous to G481 and |
| | | | | G482 |
| 368 | G3436 | PRT | Zea mays | Orthologous to G481 and G482 |
| 369 | G3437 | DNA | Zea mays | Predicted polypeptide sequence |
| | | | | is orthologous to G481 and |
| | | | | G482 |
| 370 | G3437 | PRT | Zea mays | Orthologous to G481 and G482 |
| 371 | G3444 | DNA | Zea mays | Predicted polypeptide sequence |
| | | | | is orthologous to G682 |
| 372 | G3444 | PRT | Zea mays | Orthologous to G682 |
| 373 | G3445 | DNA | Glycine max | Predicted polypeptide sequence |
| | | | | is orthologous to G682 |
| 374 | G3445 | PRT | Glycine max | Orthologous to G682 |
| 375 | G3446 | DNA | Glycine max | Predicted polypeptide sequence |
| | | | | is orthologous to G682 |
| 376 | G3446 | PRT | Glycine max | Orthologous to G682 |
| 377 | G3447 | DNA | Glycine max | Predicted polypeptide sequence |
| | | | | is orthologous to G682 |
| 378 | G3447 | PRT | Glycine max | Orthologous to G682 |
| 379 | G3448 | DNA | Glycine max | Predicted polypeptide sequence |
| | | | | is orthologous to G682 |
| 380 | G3448 | PRT | Glycine max | Orthologous to G682 |
| 381 | G3449 | DNA | Glycine max | Predicted polypeptide sequence |
| | | | | is orthologous to G682 |
| 382 | G3449 | PRT | Glycine max | Orthologous to G682 |
| 383 | G3450 | DNA | Glycine max | Predicted polypeptide sequence |
| | | | | is orthologous to G682 |
| 384 | G3450 | PRT | Glycine max | Orthologous to G682 |
| 385 | G3456 | DNA | Glycine max | Predicted polypeptide sequence |
| | | | | is orthologous to G1073 |
| 386 | G3456 | PRT | Glycine max | Orthologous to G1073 |
| 387 | G3458 | DNA | Glycine max | Functionally related and |
| | | | | homologous to G1073 |
| 388 | G3458 | PRT | Glycine max | Functionally related and |
| | | | | homologous to G1073 |
| 389 | G3459 | DNA | Glycine max | Predicted polypeptide sequence |
| | | | | is functionally related and |
| | | | | homologous to G1073 |
| 390 | G3459 | PRT | Glycine max | Functionally related and |
| | | | | homologous to G1073 |
| 391 | G3460 | DNA | Glycine max | Predicted polypeptide sequence |
| | | | | is functionally related and |
| | | | | homologous to G1073 |
| 392 | G3460 | PRT | Glycine max | Functionally related and |
| | | | | homologous to G1073 |
| 393 | G3462 | DNA | Glycine max | Predicted polypeptide sequence |
| | | | | is orthologous to G1073 |
| 394 | G3462 | PRT | Glycine max | Orthologous to G1073 |
| 395 | G3470 | DNA | Glycine max | Predicted polypeptide sequence |
| | | | | is orthologous to G481 and |
| | | | | G482 |
| 396 | G3470 | PRT | Glycine max | Orthologous to G481 and G482 |
| 397 | G3471 | DNA | Glycine max | Predicted polypeptide sequence |
| | | | | is orthologous to G481 and |
| | | | | G482 |
| 398 | G3471 | PRT | Glycine max | Orthologous to G481 and G482 |
| 399 | G3472 | DNA | Glycine max | Predicted polypeptide sequence |
| | | | | is orthologous to G481 and |
| | | | | G482 |
| 400 | G3472 | PRT | Glycine max | Orthologous to G481 and G482 |
| 401 | G3473 | DNA | Glycine max | Predicted polypeptide sequence |
| | | | | is orthologous to G481 and |
| | | | | G482 |
| 402 | G3473 | PRT | Glycine max | Orthologous to G481 and G482 |
| 403 | G3474 | DNA | Glycine max | Predicted polypeptide sequence |
| | | | | is orthologous to G481 and |
| | | | | G482 |
| 404 | G3474 | PRT | Glycine max | Orthologous to G481 and G482 |
| 405 | G3475 | DNA | Glycine max | Predicted polypeptide sequence |
| | | | | is orthologous to G481 and |
| | | | | G482 |
| 406 | G3475 | PRT | Glycine max | Orthologous to G481 and G482 |
| 407 | G3476 | DNA | Glycine max | Predicted polypeptide sequence |
| | | | | is orthologous to G481 and |
| | | | | G482 |
| 408 | G3476 | PRT | Glycine max | Orthologous to G481 and G482 |
| 409 | G3477 | DNA | Glycine max | Predicted polypeptide sequence |
| | | | | is orthologous to G481 and |
| | | | | G482 |
| 410 | G3477 | PRT | Glycine max | Orthologous to G481 and G482 |
| 411 | G3478 | DNA | Glycine max | Predicted polypeptide sequence |
| | | | | is orthologous to G481 and |
| | | | | G482 |
| 412 | G3478 | PRT | Glycine max | Orthologous to G481 and G482 |
| 413 | G3556 | DNA | Oryza sativa (japonica | Predicted polypeptide sequence |
| | | | cultivar-group) | is orthologous to G1073 |
| 414 | G3556 | PRT | Oryza sativa (japonica | Orthologous to G1073 |
| | | | cultivar-group) | |
| 415 | G3835 | DNA | Oryza sativa (japonica | Predicted polypeptide sequence |
| | | | cultivar-group) | is orthologous to G481 and |
| | | | | G482 |
| 416 | G3835 | PRT | Oryza sativa (japonica | Orthologous to G481 and G482 |
| | | | cultivar-group) | |
| 417 | G3836 | DNA | Oryza sativa (japonica | Predicted polypeptide sequence |
| | | | cultivar-group) | is orthologous to G481 and |
| | | | | G482 |
| 418 | G3836 | PRT | Oryza sativa (japonica | Orthologous to G481 and G482 |
| | | | cultivar-group) | |
| 419 | G3837 | DNA | Glycine max | Predicted polypeptide sequence |
| | | | | is orthologous to G481 and |
| | | | | G482 |
| 420 | G3837 | PRT | Glycine max | Orthologous to G481 and G482 |

Molecular Modeling

[0314] Another means that may be used to confirm the utility and function of transcription factor sequences that are orthologous or paralogous to presently disclosed transcription factors is through the use of molecular modeling software. Molecular modeling is routinely used to predict polypeptide structure, and a variety of protein structure modeling programs, such as “Insight II” (Accelrys, Inc.) are commercially available for this purpose. Modeling can thus be used to predict which residues of a polypeptide can be changed without altering function (Crameri et al. (2003) U.S. Pat. No. 6,521,453). Thus, polypeptides that are sequentially similar can be shown to have a high likelihood of similar function by their structural similarity, which may, for example, be established by comparison of regions of superstructure. The relative tendencies of amino acids to form regions of superstructure (for example, helixes and _-sheets) are well established. For example, O'Neil et al. ((1990) Science 250: 646-651) have discussed in detail the helix forming tendencies of amino acids. Tables of relative structure forming activity for amino acids can be used as substitution tables to predict which residues can be functionally substituted in a given region, for example, in DNA-binding domains of known transcription factors and equivalogs. Homologs that are likely to be functionally similar can then be identified.

[0315] Of particular interest is the structure of a transcription factor in the region of its conserved domains, such as those identified in Table 1. Structural analyses may be performed by comparing the structure of the known transcription factor around its conserved domain with those of orthologs and paralogs. Analysis of a number of polypeptides within a transcription factor group or clade, including the functionally or sequentially similar polypeptides provided in the Sequence Listing, may also provide an understanding of structural elements required to regulate transcription within a given family.

### EXAMPLES

[0316] The invention, now being generally described, will be more readily understood by reference to the following examples, which are included merely for purposes of illustration of certain aspects and embodiments of the present invention and are not intended to limit the invention. It will be recognized by one of skill in the art that a transcription factor that is associated with a particular first trait may also be associated with at least one other, unrelated and inherent second trait which was not predicted by the first trait.

[0317] The complete descriptions of the traits associated with each polynucleotide of the invention are fully disclosed in Example IX. The complete description of the transcription factor gene family and identified conserved domains of the polypeptide encoded by the polynucleotide is fully disclosed in Table 1.

### Example 1

### Full Length Gene Identification and Cloning

[0318] Putative transcription factor sequences (genomic or ESTs) related to known transcription factors were identified in the Arabidopsis thaliana GenBank database using the tblastn sequence analysis program using default parameters and a P-value cutoff threshold of −4 or −5 or lower, depending on the length of the query sequence. Putative transcription factor sequence hits were then screened to identify those containing particular sequence strings. If the sequence hits contained such sequence strings, the sequences were confirmed as transcription factors.

[0319] Alternatively, Arabidopsis thaliana cDNA libraries derived from different tissues or treatments, or genomic libraries were screened to identify novel members of a transcription family using a low stringency hybridization approach. Probes were synthesized using gene specific primers in a standard PCR reaction (annealing temperature 60° C.) and labeled with ³²P dCTP using the High Prime DNA Labeling Kit (Boehringer Mannheim Corp. (now Roche Diagnostics Corp., Indianapolis, Ind.). Purified radiolabelled probes were added to filters immersed in Church hybridization medium (0.5 M NaPO₄ pH 7.0, 7% SDS, 1% w/v bovine serum albumin) and hybridized overnight at 60° C. with shaking. Filters were washed two times for 45 to 60 minutes with lxSCC, 1% SDS at 60° C.

[0320] To identify additional sequence 5′ or 3′ of a partial cDNA sequence in a cDNA library, 5′ and 3′ rapid amplification of cDNA ends (RACE) was performed using the MARATHON cDNA amplification kit (Clontech, Palo Alto, Calif.). Generally, the method entailed first isolating poly(A) mRNA, performing first and second strand cDNA synthesis to generate double stranded cDNA, blunting cDNA ends, followed by ligation of the MARATHON Adaptor to the cDNA to form a library of adaptor-ligated ds cDNA.

[0321] Gene-specific primers were designed to be used along with adaptor specific primers for both 5′ and 3′ RACE reactions. Nested primers, rather than single primers, were used to increase PCR specificity. Using 5′ and 3′ RACE reactions, 5′ and 3′ RACE fragments were obtained, sequenced and cloned. The process can be repeated until 5′ and 3′ ends of the full-length gene were identified. Then the full-length cDNA was generated by PCR using primers specific to 5′ and 3′ ends of the gene by end-to-end PCR.

### Example II

### Construction of Expression Vectors

[0322] The sequence was amplified from a genomic or cDNA library using primers specific to sequences upstream and downstream of the coding region. The expression vector was pMEN20 or pMEN65, which are both derived from pMON316 (Sanders et al. (1987) Nucleic Acids Res. 15:1543-1558) and contain the CaMV 35S promoter to express transgenes. To clone the sequence into the vector, both pMEN20 and the amplified DNA fragment were digested separately with SalI and NotI restriction enzymes at 37° C. for 2 hours. The digestion products were subject to electrophoresis in a 0.8% agarose gel and visualized by ethidium bromide staining. The DNA fragments containing the sequence and the linearized plasmid were excised and purified by using a QIAQUICK gel extraction kit (Qiagen, Valencia Calif.). The fragments of interest were ligated at a ratio of 3:1 (vector to insert). Ligation reactions using T4 DNA ligase (New England Biolabs, Beverly Mass.) were carried out at 16° C. for 16 hours. The ligated DNAs were transformed into competent cells of the E. coli strain DH5alpha by using the heat shock method. The transformations were plated on LB plates containing 50 mg/l kanamycin (Sigma Chemical Co. St. Louis Mo.). Individual colonies were grown overnight in five milliliters of LB broth containing 50 mg/l kanamycin at 37° C. Plasmid DNA was purified by using Qiaquick Mini Prep kits (Qiagen).

### Example III

### Transformation of Agrobacterium With the Expression Vector

[0323] After the plasmid vector containing the gene was constructed, the vector was used to transform Agrobacterium tumefaciens cells expressing the gene products. The stock of Agrobacterium tumefaciens cells for transformation was made as described by Nagel et al. (1990) FEMS Microbiol Letts. 67: 325-328. Agrobacterium strain ABI was grown in 250 ml LB medium (Sigma) overnight at 28° C. with shaking until an absorbance over 1 cm at 600 nm (A₆₀₀) of 0.5-1.0 was reached. Cells were harvested by centrifugation at 4,000×g for 15 min at 4° C. Cells were then resuspended in 250 μl chilled buffer (1 mM HEPES, pH adjusted to 7.0 with KOH). Cells were centrifuged again as described above and resuspended in 125 μl chilled buffer. Cells were then centrifuged and resuspended two more times in the same HEPES buffer as described above at a volume of 100 μl and 750 μl, respectively. Resuspended cells were then distributed into 40 μl aliquots, quickly frozen in liquid nitrogen, and stored at −80° C.

[0324] Agrobacterium cells were transformed with plasmids prepared as described above following the protocol described by,Nagel et al. (supra). For each DNA construct to be transformed, 50-100 ng DNA (generally resuspended in 10 mM Tris-HCl, 1 mM EDTA, pH 8.0) was mixed with 40 μl of Agrobacterium cells. The DNA/cell mixture was then transferred to a chilled cuvette with a 2 mm electrode gap and subject to a 2.5 kV charge dissipated at 25 μF and 200 μF using a Gene Pulser II apparatus (Bio-Rad, Hercules, Calif.). After electroporation, cells were immediately resuspended in 1.0 ml LB and allowed to recover without antibiotic selection for 2-4 hours at 28° C. in a shaking incubator. After recovery, cells were plated onto selective medium of LB broth containing 100 μg/ml spectinomycin (Sigma) and incubated for 24-48 hours at 28° C. Single colonies were then picked and inoculated in fresh medium. The presence of the plasmid construct was verified by PCR amplification and sequence analysis.

### Example IV

### Transformation of Arabidopsis Plants with Agrobacterium tumefaciens With Expression Vector

[0325] After transformation of Agrobacterium tumefaciens with plasmid vectors containing the gene, single Agrobacterium colonies were identified, propagated, and used to transform Arabidopsis plants. Briefly, 500 ml cultures of LB medium containing 50 mg/l kanamycin were inoculated with the colonies and grown at 28° C. with shaking for 2 days until an optical absorbance at 600 nm wavelength over 1 cm (A₆₀₀) of >2.0 is reached. Cells were then harvested by centrifugation at 4,000×g for 10 min, and resuspended in infiltration medium (½× Murashige and Skoog salts (Sigma), 1× Gamborg's B-5 vitamins (Sigma), 5.0% (w/v) sucrose (Sigma), 0.044 μM benzylamino purine (Sigma), 200 μl/l Silwet L-77 (Lehle Seeds) until an A₆₀₀ of 0.8 was reached.

[0326] Prior to transformation, Arabidopsis thaliana seeds (ecotype Columbia) were sown at a density of ˜10 plants per 4″ pot onto Pro-Mix BX potting medium (Hummert International) covered with fiberglass mesh (18 mm×16 mm). Plants were grown under continuous illumination (50-75 μE/m²/sec) at 22-23° C. with 65-70% relative humidity. After about 4 weeks, primary inflorescence stems (bolts) are cut off to encourage growth of multiple secondary bolts. After flowering of the mature secondary bolts, plants were prepared for transformation by removal of all siliques and opened flowers.

[0327] The pots were then immersed upside down in the mixture of Agrobacterium infiltration medium as described above for 30 sec, and placed on their sides to allow draining into a 1′×2′ flat surface covered with plastic wrap. After 24 h, the plastic wrap was removed and pots are turned upright. The immersion procedure was repeated one week later, for a total of two immersions per pot. Seeds were then collected from each transformation pot and analyzed following the protocol described below.

### Example V

### Identification of Arabidopsis Primary Transformants

[0328] Seeds collected from the transformation pots were sterilized essentially as follows. Seeds were dispersed into in a solution containing 0.1% (v/v) Triton X-100 (Sigma) and sterile water and washed by shaking the suspension for 20 min. The wash solution was then drained and replaced with fresh wash solution to wash the seeds for 20 min with shaking. After removal of the ethanol/detergent solution, a solution containing 0.1% (v/v) Triton X-100 and 30% (v/v) bleach (CLOROX; Clorox Corp. Oakland Calif.) was added to the seeds, and the suspension was shaken for 10 min. After removal of the bleach/detergent solution, seeds were then washed five times in sterile distilled water. The seeds were stored in the last wash water at 4° C. for 2 days in the dark before being plated onto antibiotic selection medium (1× Murashige and Skoog salts (pH adjusted to 5.7 with 1M KOH), 1× Gamborg's B-5 vitamins, 0.9% phytagar (Life Technologies), and 50 mg/l kanamycin). Seeds were germinated under continuous illumination (50-75 μE/m²/sec) at 22-23° C. After 7-10 days of g under these conditions, kanamycin resistant primary transformants (T1 generation) were visible and obtained. These seedlings were transferred first to fresh selection plates where the seedlings continued to grow for 3-5 more days, and then to soil (Pro-Mix BX potting medium).

[0329] Primary transformants were crossed and progeny seeds (T₂) collected; kanamycin resistant seedlings were selected and analyzed. The expression levels of the recombinant polynucleotides in the transformants varies from about a 5% expression level increase to a least a 100% expression level increase. Similar observations are made with respect to polypeptide level expression.

### Example VI

### Identification of Arabidopsis Plants with Transcription Factor Gene Knockouts

[0330] The screening of insertion mutagenized Arabidopsis collections for null mutants in a known target gene was essentially as described in Krysan et al. (1999) Plant Cell 11: 2283-2290. Briefly, gene-specific primers, nested by 5-250 base pairs to each other, were designed from the 5′ and 3′ regions of a known target gene. Similarly, nested sets of primers were also created specific to each of the T-DNA or transposon ends (the “right” and “left” borders). All possible combinations of gene specific and T-DNA/transposon primers were used to detect by PCR an insertion event within or close to the target gene. The amplified DNA fragments were then sequenced which allows the precise determination of the T-DNA/transposon insertion point relative to the target gene. Insertion events within the coding or intervening sequence of the genes were deconvoluted from a pool comprising a plurality of insertion events to a single unique mutant plant for functional characterization. The method is described in more detail in Yu and Adam, U.S. application Ser. No. 09/177,733 filed Oct. 23, 1998.

### Example VII

### Identification of Modified Phenotypes in Overexpression or Gene Knockout Plants

[0331] Experiments were performed to identify those transformants or knockouts that exhibited modified biochemical characteristics.

[0332] Calibration of NIRS response was performed using data obtained by wet chemical analysis of a population of Arabidopsis ecotypes that were expected to represent diversity of oil and protein levels.

[0333] Experiments were performed to identify those transformants or knockouts that exhibited modified sugar-sensing. For such studies, seeds from transformants were germinated on media containing 5% glucose or 9.4% sucrose which normally partially restrict hypocotyl elongation. Plants with altered sugar sensing may have either longer or shorter hypocotyls than normal plants when grown on this media. Additionally, other plant traits may be varied such as root mass.

[0334] In some instances, expression patterns of the stress-induced genes may be monitored by microarray experiments. In these experiments, cDNAs are generated by PCR and resuspended at a final concentration of about 100 ng/μl in 3×SSC or 150 mM Na-phosphate (Eisen and Brown (1999) Methods Enzymol. 303: 179-205). The cDNAs are spotted on microscope glass slides coated with polylysine. The prepared cDNAs are aliquoted into 384 well plates and spotted on the slides using, for example, an x-y-z gantry (OmniGrid) which may be purchased from GeneMachines (Menlo Park, Calif.) outfitted with quill type pins which may be purchased from Telechem International (Sunnyvale, Calif.). After spotting, the arrays are cured for a minimum of one week at room temperature, rehydrated and blocked following the protocol recommended by Eisen and Brown (1999) supra.

[0335] Sample total RNA (10 μg) samples are labeled using fluorescent Cy3 and Cy5 dyes. Labeled samples are resuspended in 4×SSC/0.03% SDS/4 μg salmon sperm DNA/2 μg tRNA/50 mM Na-pyrophosphate, heated for 95° C. for 2.5 minutes, spun down and placed on the array. The array is then covered with a glass coverslip and placed in a sealed chamber. The chamber is then kept in a water bath at 62° C. overnight. The arrays are washed as described in Eisen and Brown (1999, supra) and scanned on a General Scanning 3000 laser scanner. The resulting files are subsequently quantified using IMAGENE, software (BioDiscovery, Los Angeles Calif.).

[0336] RT-PCR experiments may be performed to identify those genes induced after exposure to drought stress. Generally, the gene expression patterns from ground plant leaf tissue is examined. Reverse transcriptase PCR was conducted using gene specific primers within the coding region for each sequence identified. The primers were designed near the 3′ region of each DNA binding sequence initially identified.

[0337] Total RNA from these ground leaf tissues was isolated using the CTAB extraction protocol. Once extracted total RNA was normalized in concentration across all the tissue types to ensure that the PCR reaction for each tissue received the same amount of cDNA template using the 28S band as reference. Poly(A+) RNA was purified using a modified protocol from the Qiagen OLIGOTEX purification kit batch protocol. cDNA was synthesized using standard protocols. After the first strand cDNA synthesis, primers for Actin 2 were used to normalize the concentration of cDNA across the tissue types. Actin 2 is found to be constitutively expressed in fairly equal levels across the tissue types we are investigating.

[0338] For RT PCR, cDNA template was mixed with corresponding primers and Taq DNA polymerase. Each reaction consisted of 0.2 μl cDNA template, 2 μl 10× Tricine buffer, 2 μl 10× Tricine buffer and 16.8 μl water, 0.05 μl Primer 1, 0.05 μl, Primer 2, 0.3 μl Taq DNA polymerase and 8.6 μl water.

[0339] The 96 well plate is covered with microfilm and set in the thermocycler to start the reaction cycle. By way of illustration, the reaction cycle may comprise the following steps:

[0340] Step 1: 93° C. for 3 min;

[0341] Step 2: 93° C. for 30 sec;

[0342] Step 3: 65° C. for 1 min;

[0343] Step 4: 72° C. for 2 min;

[0344] Steps 2, 3 and 4 are repeated for 28 cycles;

[0345] Step 5: 72° C. for 5 min; and

[0346] STEP 6 4° C.

[0347] To amplify more products, for example, to identify genes that have very low expression, additional steps may be performed: The following method illustrates a method that may be used in this regard. The PCR plate is placed back in the thermocycler for 8 more cycles of steps 2-4.

[0348] Step 2 93° C. for 30 sec;

[0349] Step 3 65° C. for 1 min;

[0350] Step 4 72° C. for 2 min, repeated for 8 cycles; and

[0351] Step 5 4° C.

[0352] Eight microliters of PCR product and 1.5 μl of loading dye are loaded on a 1.2% agarose gel for analysis after 28 cycles and 36 cycles. Expression levels of specific transcripts are considered low if they were only detectable after 36 cycles of PCR. Expression levels are considered medium or high depending on the levels of transcript compared with observed transcript levels for an internal control such as actin2. Transcript levels are determined in repeat experiments and compared to transcript levels in control (e.g., non-transformed) plants.

[0353] The sequences of the Sequence Listing, can be used to prepare transgenic plants and plants with altered drought stress tolerance. The specific transgenic plants listed below are produced from the sequences of the Sequence Listing, as noted.

### Example VIII

### Analysis Methods for Soil-Based Drought Assays

[0354] Soil-based drought screens were performed with Arabidopsis plants overexpressing the transcription factors listed in the Sequence Listing. Seeds from wild-type Arabidopsis plants, or plants overexpressing a polypeptide of the invention, were stratified for three days at 4° C. in 0.1% agarose. Fourteen seeds of each overexpressor or wild-type were then sown in three inch clay pots containing a 50:50 mix of vermiculite:perlite topped with a small layer of MetroMix 200 and grown for fifteen days under 24 hr light. Pots containing wild-type and overexpressing seedlings were placed in flats in random order. Drought stress was initiated by placing pots on absorbent paper for seven to eight days. The seedlings were considered to be sufficiently stressed when the majority of the pots containing wild-type seedlings within a flat had become severely wilted. Pots were then re-watered and survival was scored four to seven days later. Plants were ranked against wild-type controls for each of two criteria: tolerance to the drought conditions and recovery (survival) following re-watering

[0355] At the end of the initial drought period, each pot was assigned a numeric value score depending on the above criteria. Scores of 0-6 were assigned (Table 9), with a low value of “0” assigned to plants with an extremely poor appearance (i.e., the plants were uniformly brown) and a value of “6” given to plants that were rated very healthy in appearance (i.e., the plants were all green). After the plants were rewatered and incubated an additional four to seven days, the plants were reevaluated to indicate the degree of recovery from the water deprivation treatment.

[0356] An analysis was then conducted to determine which plants best survived water deprivation, identifying the transgenes that consistently conferred drought-tolerant phenotypes and their ability to recover from this treatment. The analysis was performed by comparing overall and within-flat tabulations with a set of statistical models to account for variations between batches. Several measures of survival were tabulated, including: (a) the average proportion of plants surviving relative to wild-type survival within the same flat; (b) the median proportion surviving relative to wild-type survival within the same flat; (c) the overall average survival (taken over all batches, flats, and pots); (d) the overall average survival relative to the overall wild-type survival; and (e) the average visual score of plant health before rewatering.

### Example IX

### Genes that Confer Significant Improvements to Plants

[0357] Examples of genes and homologs that confer significant improvements to knockout or overexpressing plants are noted below. Experimental observations made by us with regard to specific genes whose expression has been modified in overexpressing or knock-out plants, and potential applications based on these observations, are also presented.

[0358] This example provides experimental evidence for increased biomass and abiotic stress tolerance controlled by the transcription factor polypeptides and polypeptides of the invention.

[0359] Salt stress assays are intended to find genes that confer better germination, seedling vigor or growth in high salt. Evaporation from the soil surface causes upward water movement and salt accumulation in the upper soil layer where the seeds are placed. Thus, germination normally takes place at a salt concentration much higher than the mean salt concentration of the whole soil profile. Plants differ in their tolerance to NaCl depending on their stage of development, therefore seed germination, seedling vigor, and plant growth responses are evaluated.

[0360] Osmotic stress assays (including NaCl and mannitol assays) are intended to determine if an osmotic stress phenotype is NaCl-specific or if it is a general osmotic stress related phenotype. Plants tolerant to osmotic stress could also have more tolerance to drought and/or freezing.

[0361] Drought assays are intended to find genes that mediate better plant survival after short-term, severe water deprivation. Ion leakage is measured if needed. Osmotic stress tolerance also is predictive of a drought tolerant phenotype.

[0362] Sugar sensing assays are intended to find genes involved in sugar sensing by germinating seeds on high concentrations of sucrose and glucose and looking for degrees of hypocotyl elongation. The germination assay on mannitol controls for responses related to osmotic stress. Sugars are key regulatory molecules that affect diverse processes in higher plants including germination, growth, flowering, senescence, sugar metabolism and photosynthesis. Sucrose is the major transport form of photosynthate and its flux through cells has been shown to affect gene expression and alter storage compound accumulation in seeds (source-sink relationships). Glucose-specific hexose-sensing has also been described in plants and is implicated in cell division and repression of “famine” genes (photosynthetic or glyoxylate cycles).

[0363] Germination assays followed modifications of the same basic protocol. Sterile seeds were sown on the conditional media listed below. Plates were incubated at 22° C. under 24-hour light (120-130 μEin/m²/s) in a growth chamber. Evaluation of germination and seedling vigor was conducted 3 to 15 days after planting. The basal media was 80% Murashige-Skoog medium (MS)+vitamins.

[0364] For salt and osmotic stress germination experiments, the medium was supplemented with 150 mM NaCl or 300 mM mannitol. Growth regulator sensitivity assays were performed in MS media, vitamins, and either 0.3 μM ABA, 9.4% sucrose, or 5% glucose.

Results:

[0365] As noted below, overexpression of G2133, G1274, G922, G2999, G3086, G354, G1792, G2053, G975, G1069, G916, G1820, G2701, G47, G2854, G2789, G634, G175, G2839, G1452, G3083, G489, G303, G2992, and G682 was shown to increase drought stress tolerance in plants.

G2133 (SEQ ID NOs: 11 and 12)

Published Information

[0366] G2133 corresponds to gene F26A9.11 (AAF23336). No information is available about the function(s) of G2133.

Closely Related Genes from Other Species

[0367] G2133 does not show extensive sequence similarity with known genes from other plant species outside of the conserved AP2/EREBP domain.

Experimental Observations

[0368] The function of G2133 was studied using transgenic plants in which the gene was expressed under the control of the 35S promoter.

[0369] G2133 expression was detected in a variety of tissues: flower, leaf, embryo, and silique samples. Its expression might be altered by several conditions, including auxin treatment, osmotic stress, and Fusarium infection. Overexpression of G2133 caused a variety of alterations in plant growth and development: delayed flowering, altered inflorescence architecture, and a decrease in overall size and fertility.

[0370] At early stages, 35S::G2133 transformants were markedly smaller than controls and displayed curled, dark-green leaves. Most of these plants remained in a vegetative phase of development substantially longer than controls, and produced an increased number of leaves before bolting. In the most severely affected plants, bolting occurred more than a month later than in wild type (24-hour light). In addition, the plants displayed a reduction in apical dominance and formed large numbers of shoots simultaneously, from the axils of rosette leaves. These inflorescence stems had short internodes, and carried increased numbers of cauline leaf nodes, giving them a very leafy appearance. The fertility of 35S::G2133 plants was generally very low. In addition, G2133 overexpressing lines were found to be more resistant to the herbicide glyphosate in initial and repeat experiments.

[0371] No alterations were detected in 35S::G2133 plants in the biochemical analyses that were performed.

[0372] G2133 is a paralog of G47, the latter having been known from earlier studies to confer a drought tolerance phenotype when overexpressed. It was thus not surprising when G2133 was also shown to induce drought tolerance in a number of 35S::G2133 lines challenged in soil-based drought assays (Tables 9 and 10). Results with two of these lines are shown in FIGS. 7A and 7B, which compare the recovery of these lines from eight days of drought treatment with that of wild-type controls. After re-watering, all of the plants of both G2133 overexpressor lines became reinvigorated, and all of the control plants died or were severely affected by the drought treatment (Table 9).

Utilities

[0373] G2133 and its equivalogs can be used to increase the tolerance of plants to drought and to other osmotic stresses. G2133 could also be used for the generation of glyphosate resistant plants, and to increase plant resistance to oxidative stress. G2133 equivalogs include, for example, Arabidopsis thaliana SEQ ID NO: 2 (G47); Oryza sativa (japonica cultivar-group) SEQ ID NO: 98 (G3649), SEQ ID NO: 100 (G3651), and SEQ ID NO: 90 (G3644); Glycine max SEQ ID NO: 88 (G3643); Zinnia elegans SEQ ID NO: 96 (G3647); Brassica rapa subsp. Pekinensis SEQ ID NO: 92 (G3645); and Brassica oleracea SEQ ID NO: 94 (G3646).

G47 (SEQ ID NOs: 1 and 2)

Published Information

[0374] G47 corresponds to gene T22J18.2 (AAC25505). No information is available about the function(s) of G47.

Experimental Observations

[0375] The function of G47 was studied using transgenic plants in which the gene was expressed under the control of the 35S promoter. Overexpression of G47 resulted in a variety of morphological and physiological phenotypic alterations.

[0376] 35S::G47 plants showed enhanced tolerance to osmotic stress. In a root growth assay on PEG containing media, G47 overexpressing transgenic seedlings were larger and had more root growth compared to the wild-type controls (FIG. 6A). Interestingly, G47 expression levels might be altered by environmental conditions, in particular reduced by salt and osmotic stresses. In addition to the phenotype observed in the osmotic stress assay, germination efficiency for the seeds from G47 overexpressors was low.

[0377] 35S::G47 plants were also significantly larger and greener in soil-based drought assays than wild-type control plants (Tables 9 and 10).

[0378] Overexpression of G47 also produced a substantial delay in flowering time and caused a marked change in shoot architecture. 35S::G47 transformants were small at early stages and switched to flowering more than a week later than wild-type controls (continuous light conditions). Interestingly, the inflorescences from these plants appeared thick and fleshy, had reduced apical dominance, and exhibited reduced internode elongation leading to a short compact stature (FIG. 6B). The branching pattern of the stems also appeared abnormal, with the primary shoot becoming ‘kinked’ at each coflorescence node. Additionally, the plants showed slightly reduced fertility and formed rather small siliques that were borne on short pedicels and held vertically, close against the stem.

[0379] Additional alterations were detected in the inflorescence stems of 35S::G47 plants. Stem sections from T2-21 and T2-24 plants were of wider diameter, and had large irregular vascular bundles containing a much greater number of xylem vessels than wild type. Furthermore some of the xylem vessels within the bundles appeared narrow and were possibly more lignified than were those of controls.

[0380] G47 was expressed at higher levels in rosette leaves, and transcripts can be detected in other tissues (flower, embryo, silique, and germinating seedling), but apparently not in roots.

Utilities

[0381] G47 or its equivalogs can be used to increase the tolerance of plants to drought and to other osmotic stresses. G47 or its equivalogs could also be used to manipulate flowering time, to modify plant architecture and stem structure, including development of vascular tissues and lignin content. The use of G47 or its equivalogs from tree species could offer the potential for modulating lignin content. This might allow the quality of wood used for furniture or construction to be improved. G47 equivalogs include, for example, Arabidopsis thaliana SEQ ID NO: 12 (G2133); Oryza sativa (japonica cultivar-group) SEQ ID NOs: 98 (G3649), SEQ ID NO: 100 (G3651), and SEQ ID NO: 90 (G3644); Glycine max SEQ ID NO: 88 (G3643); Zinnia elegans SEQ ID NO: 96 (G3647); Brassica rapa subsp. Pekinensis SEQ ID NO: 92 (G3645); and Brassica oleracea SEQ ID NO: 94 (G3646).

G1274 (SEQ ID NOs: 5 and 6)

Published Information

[0382] G1274 is a member of the WRKY family of transcription factors. The gene corresponds to WRKY51 (At5g64810). No information is available about the function(s) of G 1274.

Exiperimental Observations

[0383] RT-PCR analysis was used to determine the endogenous expression pattern of G1274. Expression of G1274 was detected in leaf, root and flower tissues. The biotic stress related conditions, Erysiphe and SA treatment, induced expression of G1274 in leaf tissue. The gene also appeared to be slightly induced by osmotic and cold stress treatments and perhaps by auxin.

[0384] The function of G1274 was studied using transgenic plants in which the gene was expressed under the control of the 35S promoter. G1274 overexpressing lines were more tolerant to growth on low nitrogen containing media. In an assay intended to determine whether the transgene expression could alter C/N sensing, 35S::G1274 seedlings contained less anthocyanins (FIG. 25A) than wild-type controls (FIG. 25B) grown on high sucrose/N— and high sucrose/N/Gln plates. These data together indicated that overexpression of G1274 may alter a plant's ability to modulate carbon and/or nitrogen uptake and utilization.

[0385] G1274 overexpression and wild-type germination were also compared in a cold germination assay, the overexpressors appearing larger and greener (FIG. 25C) than the controls (FIG. 25D).

[0386] 35S::G1274-overexpressing plants were significantly greener and larger than wild-type control plants in a soil-based drought assay (Tables 9 and 10). FIGS. 26A-26D compare soil-based drought assays for G1274 overexpressors and wild-type control plants, which confirms the results predicted after the performance of the plate-based osmotic stress assays. 35S::G1274 lines fared much better after a period of water deprivation (FIG. 26A) than control plants (FIG. 26B). This distinction was particularly evident in the overexpressor plants after once again being watered, said plants almost all fully recovered to a healthy and vigorous state in FIG. 26C. Conversely, none of the wild-type plants seen in FIG. 26D recovered after rewatering, as it was apparently too late for rehydration to rescue these plants (Table 10).

[0387] In addition, 35S::G1274 transgenic plants were more tolerant to chilling compared to the wild-type controls, in both germination as well as seedling growth assays.

[0388] Overexpression of G1274 produced alterations in leaf morphology and inflorescence architecture. Four out of eighteen 35S::G1274 primary transformants were slightly small and developed inflorescences that were short, and showed reduced internode elongation, leading to a bushier, more compact stature than in wild-type.

[0389] In an experiment using T2 populations, it was observed that the rosette leaves from many of the plants were distinctly broad and appeared to have a greater rosette biomass than in wild type.

[0390] A similar inflorescence phenotype was obtained from overexpression of a potentially related WRKY gene, G1275. However, G1275 also caused extreme dwarfing, which was not apparent when G1274 was overexpressed.

Utilities

[0391] The phenotypic effects of G1274 or equivalog overexpression could have several potential applications:

[0392] The enhanced performance of 35S::G1274 plants in a soil-based drought assay indicated that the gene or its equivalogs may be used to enhance drought tolerance in plants.

[0393] The enhanced performance of 35S::G1274 seedlings under chilling conditions indicates that the gene or its equivalogs might be applied to engineer crops that show better growth under cold conditions.

[0394] The morphological phenotype shown by 35S::G1274 lines indicate that the gene or its equivalogs might be used to alter inflorescence architecture, to produce more compact dwarf forms that might afford yield benefits.

[0395] The effects on leaf size that were observed as a result of G1274 or equivalog overexpression might also have commercial applications. Increased leaf size, or an extended period of leaf growth, could increase photosynthetic capacity, and biomass, and have a positive effect on yield. G1274 equivalogs include, for example, Arabidopsis thaliana SEQ ID NO: 30 (G1275) and SEQ ID NO: 32 (G1758); Oryza sativa (japonica cultivar-group) SEQ ID NO: 134 (G3721), SEQ ID NO: 142 (G3725), SEQ ID NO: 144 (G3726), SEQ ID NO: 150 (G3729), and SEQ ID NO: 152 (G3730); Glycine max SEQ ID NO: 138 (G3723), SEQ ID NO: 140 (G3724), and SEQ ID NO: 208 (G3803); Solanum tuberosum SEQ ID NO: 156 (G3732); Capsicum annuum SEQ ID NO: 202 (G3795); Lactuca sativa SEQ ID NO: 204 (G3797); Hordeum vulgare SEQ ID NO: 158 (G3733); Zea mays SEQ ID NO: 130 (G3719), SEQ ID NO: 132 (G3720), SEQ ID NO: 136 (G3722), SEQ ID NO: 146 (G3727), SEQ ID NO: 148 (G3728), and SEQ ID NO: 210 (G3804); Sorghum bicolor SEQ ID NO: 206 (G3802); and Lycopersicon esculentum SEQ ID NO: 154 (G373 1).

G922 (SEQ ID NOs: 3 and 4)

Published Information

[0396] G922 corresponds to Scarecrow-like 3 (SCL3) first described by Pysh et al. (GenBank accession number AF036301; (1999) Plant J. 18: 111-119). Northern blot analysis results show that G922 is expressed in siliques, roots, and to a lesser extent in shoot tissue from 14 day old seedlings. Pysh et al did not test any other tissues for G922 expression. In situ hybridization results showed that G922 was expressed predominantly in the endodermis in the root tissue. This pattern of expression was very similar to that of SCARECROW (SCR), G306. Experimental evidence indicated that the co-localization of the expression is not due to cross-hybridization of the G922 probe with G306. Pysh et al proposed that G922 may play a role in epidermal cell specification and that G922 may either regulate or be regulated by G306.

[0397] The sequence for G922 can also be found in the annotated BAC clone F11F12 from chromosome 1 (GenBank accession number AC012561). The sequence for F11F12 was submitted to GenBank by the DNA Sequencing and Technology Center at Stanford University.

Closely Related Genes from Other Species

[0398] The amino acid sequence for a region of the Oryza sativa chromosome I clone P0466H10 (GenBank accession number AP003259) is significantly identical to G922 outside of the SCR conserved domains. Therefore, the gene represented by this region of the rice clone may be the ortholog of G922.

Experimental Observations

[0399] The function of this gene was analyzed using transgenic plants in which G922 was expressed under the control of the 35S promoter.

[0400] Morphologically, plants overexpressing G922 had altered leaf morphology, coloration, fertility, and overall plant size. In wild-type plants, expression of G922 was induced by auxin, ABA, heat, and drought treatments. In non-induced wild-type plants, G922 was expressed constitutively at low levels.

[0401] Transgenic plants overexpressing G922 were more salt tolerant than wild-type plants as determined by a root growth assay on MS media supplemented with 150 mM NaCl. Plant overexpressing G922 also were more tolerant to osmotic stress as determined by germination assays in salt-containing (150 mM NaCl; FIG. 21A) and sucrose-containing (9.4%; FIG. 21C) media than wild-type controls grown in high salt and sucrose (FIGS. 21B and 21D, respectively).

[0402] The high salt assays suggested that this gene would confer drought tolerance, a supposition confirmed by soil-based assays, in which G922-overexpressing plants were significantly healthier after water deprivation treatment than wild-type control plants (Tables 9 and 10).

Utilities

[0403] Based upon results observed in plants overexpressing G922 or its equivalogs could be used to alter salt tolerance, tolerance to osmotic stress, and leaf morphology in other plant species. Evaporation from the soil surface causes upward water movement and salt accumulation in the upper soil layer where the seeds are placed. Thus, germination normally takes place at a salt concentration much higher than the mean salt concentration of in the whole soil profile. Increased salt tolerance during the germination stage of a crop plant would impact survivability and yield.

[0404] Altered leaf morphology conferred by overexpression of G922 or its equivalogs could be desirable in ornamental horticulture. G922 equivalogs include, for example, Oryza sativa (japonica cultivar-group) SEQ ID NO: 218 (G3814), SEQ ID NO: 216 (G3813), and SEQ ID NO: 222 (G3827); Lycopersicon esculentum SEQ ID NO: 220 (G3824); and Glycine max SEQ ID NO: 212 (G3810) and SEQ ID NO: 214 (G3811).

G2999 (SEQ ED NOs: 13 and 14)

Published Information

[0405] G2999 was identified within a sequence released by the Arabidopsis Genome Initiative (Chromosome 2, GenBank accession AC006439).

Experimental Observations

[0406] The boundaries of G2999 were determined by RACE experiments and a full-length clone was PCR-amplified out of cDNA derived from mixed tissues. The function of G2999 was then assessed by analysis of transgenic Arabidopsis lines in which the cDNA was constitutively expressed from a 35S CaMV promoter. 35S::G2999 transformants displayed wild-type morphology, but two of three T2 lines showed increased tolerance to salt stress in the physiology assays. Root growth assays with G2999 overexpressing seedlings and controls in a high sodium chloride medium showed that a majority of 35S::G2999 Arabidopsis seedlings appeared larger, greener, and had more root growth than the control seedlings on the right (FIG. 11A, four control seedlings are on the right). G2998, a paralogous Arabidopsis sequence, also showed a salt tolerance phenotype in a plate-based salt stress assay, where these overexpressors were greener and had more cotyledon expansion (FIG. 11B) than wild-type seedlings (FIG. 11C). Thus, G2998 and G2999 could act in the same pathways, and have a role in the response to abiotic stress.

[0407] The high salt assays suggested that this gene would confer drought tolerance, a supposition confirmed in a soil-based assay in which G2999 overexpressing-plants were significantly more drought tolerant than wild-type control plants (Tables 9 and 10).

Utilities

[0408] Given the salt resistance exhibited by 35S::G2999 transformants, the gene and its equivalogs can be used to engineer drought and salt tolerant crops and trees that can flourish in conditions of osmotic stress. G2999 equivalogs include, for example, Arabidopsis thaliana SEQ ID NO: 50 (G2992), SEQ ID NO: 48 (G2991), SEQ ID NO: 68 (G3002), SEQ ID NO: 66 (G3001), SEQ ID NO: 46 (G2990), SEQ ID NO: 44 (G2989), SEQ ID NO: 62 (G2998), SEQ ID NO: 64 (G3000), SEQ ID NO: 54 (G2994), SEQ ID NO: 52 (G2993), SEQ ID NO: 60 (G2997), SEQ ID NO: 58 (G2996), SEQ ID NO: 56 (G2995); Zea mays SEQ ID NO: 114 (G3680); Oryza sativa (japonica cultivar group) SEQ ID NO: 128 (G3695), SEQ ID NO: 126 (G3694), SEQ ID NO: 122 (G3690), SEQ ID NO: 118 (G3685), SEQ ID NO: 108 (G3671), SEQ ID NO: 116 (G3683), and SEQ ID NO: 124 (G3692); Oryza sativa (indica cultivar group) SEQ ID NO: 120 (G3686) and SEQ ID NO: 110 (G3674); Lotus corniculatus var. japonicus SEQ ID NO: 102 (G3663) and SEQ ID NO: 106 (G3670); Brassica napus SEQ ID NO: 112 (G3675); and Flaveria bidentis SEQ ID NO: 104 (G3668).

G3086 (SEQ ID NOs: 15 and 16)

Published Information

[0409] G3086 corresponds to gene AT1G51140, annotated by the Arabidopsis Genome Initiative. No information is available about the function(s) of G3086.

Experimental Observations

[0410] The function of G3086 was studied using transgenic plants in which the gene was expressed under the control of the 35S promoter. Overexpression of G3086 in Arabidopsis produced a pronounced acceleration in the onset of flowering. 35S::G3086 transformants produced visible flower buds 5-7 days early (in inductive 24-hour light conditions), and were markedly smaller than wild-type controls.

[0411] G3086 overexpressing lines were larger and more tolerant of heat stress. FIG. 18A shows the effects of a heat assay on Arabidopsis wild-type and G3086-overexpressing plants. The overexpressors on the left were generally larger, paler, and exhibited earlier bolting than the wild type plants seen on the right of this plate.

[0412] 35S::G3086 transformants were also larger and displayed more root growth when grown under high salt conditions. G3086 overexpressors, as exemplified by the eight seedlings on the right of FIG. 18B, were larger, greener, and had more root growth than control plants, as exemplified by the four seedlings on the right in FIG. 18B.

[0413] The high salt assays suggested that this gene may confer drought tolerance, a supposition confirmed in a soil-based assay in which G3086 overexpressing-plants were significantly more tolerant of drought stress than control plants in soil-based drought assays (Tables 9 and 10).

Utilities

[0414] Based on the phenotypes observed in morphological and physiological assays, G3086 and its equivalogs might be have a number of utilities.

[0415] Given the salt resistance exhibited by 35S::G3086 transformants, the gene or its equivalogs might be used to engineer salt tolerant crops and trees that can flourish in saline soils, or under drought conditions.

[0416] Based on the response of 35S::G3086 lines to heat stress, the gene or its equivalogs might be used to engineer crop plants with increased tolerance to abiotic stresses such as high temperatures, a stress that often occurs simultaneously with other environmental stress conditions such as drought or salt stress.

[0417] The early flowering displayed by 35S::G3086 transformants indicated that the gene or its equivalogs might be used to accelerate the flowering of commercial species, or to eliminate any requirements for vernalization.

[0418] G3086 equivalogs include, for example, Arabidopsis thaliana SEQ ID NO: 26 (G592), SEQ ID NO: 28 (G1134), SEQ ID NO: 38 (G2149), SEQ ID NO: 40 (G2555); and SEQ ID NO: 42 (G2766); Oryza sativa (japonica cultivar-group) SEQ ID NO: 168 (G3740), SEQ ID NO: 170 (G3741), SEQ ID NO: 172 (G3742), SEQ ID NO: 174 (G3744), and SEQ ID NO: 176 (G3746); Glycine max SEQ ID NO: 180 (G3763), SEQ ID NO: 182 (G3764), SEQ ID NO: 184 (G3765), SEQ ID NO: 186 (G3766), SEQ ID NO: 188 (G3767), SEQ ID NO: 190 (G3768), SEQ ID NO: 192 (G3769), SEQ ID NO: 194 (G3771), and SEQ ID NO: 196 (G3772); Zea mays SEQ ID NO: 178 (G3755); and Pinus taeda SEQ ID NO: 197 (G3782).

G354 (SEQ ID NOs: 227 and 228)

Published Information

[0419] G354 was identified in the sequence of BAC clone F12M12, GenBank accession number AL355775, released by the Arabidopsis Genome Initiative. G354 corresponds to ZAT7 (Meissner and Michael (1997) Plant Mol. Biol. 33: 615-624).

Experimental Observations

[0420] The highest level of expression of G354 was observed in rosette leaves, embryos, and siliques. Some expression of G354 was also observed in flowers.

[0421] The function of this gene was analyzed using transgenic plants in which G353 was expressed under the control of the 35S promoter. 35S::G354 plants had a reduction in flower pedicel length, and downward pointing siliques. This phenotype was very similar to that described for the brevipedicellus (bp) mutant (Koornneef et al. (1983) J. Hered. 74: 265-272) and in overexpression of a related gene G353. Other morphological changes in shoots were also observed in 35S::G354 plants. Many 35S::G354 seedlings had abnormal cotyledons, elongated, thickened hypocotyls, and short roots. The majority of T1 plants had a very extreme phenotype, were tiny, and arrested development without forming inflorescences. T1 plants showing more moderate effects had poor seed yield.

[0422] Overexpression of G354 in Arabidopsis resulted in seedlings with an altered response to light. In a germination assay conducted in darkness, G354 seedlings failed to show an etiolation response, as can been seen in FIG. 30 which shows G354 overexpressing and wild-type seedlings germinated on MS plates in the dark. In some cases the phenotype was severe; overexpression of the transgene resulted in reduced open and greenish cotyledons.

[0423] G354 overexpressors were also shown to be tolerant to water deprivation in soil-based drought assays (Tables 9 and 10). Closely related paralogs of this gene, G353 and G2839, also showed an osmotic stress tolerance phenotype in a germination assay on media containing high sucrose; one line of 35S::G353 seedlings and several lines of 35S::G2839 were greener and had higher germination rates than controls. Thus, G354 and its paralogs G353 and G2839 appear to influence osmotic stress responses.

Utilities

[0424] G354 and its equivalogs can be could be used to increase a plant's tolerance to drought and other osmotic stress, and can be used alter inflorescence structure, which may have value in production of novel ornamental plants.

G1792 (SEQ ID NO: 7 and 8)

Published Information

[0425] G1792 was identified in the sequence of BAC clone K14B15 (AB025608, gene K14B15.14).

Closely Related Genes from Other Species

[0426] G1792 shows sequence similarity, outside the conserved AP2 domain, with a portion of a predicted protein from tomato, represented by EST sequence AI776626 (AI776626 EST257726 tomato resistant, Cornell Lycopersicon esculentum cDNA clone cLER19A14, mRNA sequence).

Experimental Observations

[0427] G1792 was studied using transgenic plants in which the gene was expressed under the control of the 35S promoter.

[0428] In soil-based assays, G1792 overexpressing plants were significantly more drought tolerant than wild-type control plants (FIGS. 15A and 15B, Tables 9 and 10).

[0429] 35S::G1792 plants were more tolerant to the fungal pathogens Fusarium oxysporum and Botrytis cinerea and showed fewer symptoms after inoculation with a low dose of each pathogen. This result was confirmed using individual T2 lines. The effect of G1792 overexpression in increasing tolerance to pathogens received further, incidental confirmation. T2 plants of two 35S::G1792 lines had been growing in a room that suffered a serious powdery mildew infection. For each line, a pot of six plants was present in a flat containing nine other pots of lines from unrelated genes. In either of the two different flats, the only plants that were free from infection were those from the 35S::G1792 line. This observation suggested that G1792 overexpression might be used to increase resistance to powdery mildew. Additional experiments confirmed that 35S::G1792 plants showed increased tolerance to Erysiphe. G1792 was ubiquitously expressed, but appeared to be induced by salicylic acid.

[0430] 35S::G1792 overexpressing plants also showed more tolerance to growth under nitrogen-limiting conditions. In a root growth assay under conditions of limiting N, 35S::G1792 lines were slightly less stunted. In a germination assay that monitored the effect of C on N signaling through anthocyanin production on high sucrose plus and minus glutamine the 35S::G1792 lines made less anthocyanin on high sucrose plus glutamine, suggesting that the gene can be involved in the plants ability to monitor their carbon and nitrogen status.

[0431] G1792 overexpressing plants showed several mild morphological alterations: leaves were dark green and shiny, and plants bolted, subsequently senesced, slightly later than wild-type controls. Among the T1 plants, additional morphological variation (not reproduced later in the T2 plants) was observed: many showed reductions in size as well as aberrations in leaf shape, phyllotaxy, and flower development.

Utilities

[0432] G1792 or its equivalogs can be used to improve drought and other osmotic stress tolerances, and engineer pathogen-resistant plants. In addition, it can also be used to improve seedling germination and performance under conditions of limited nitrogen.

[0433] Potential utilities of this gene or its equivalogs also include increasing chlorophyll content allowing more growth and productivity in conditions of low light. With a potentially higher photosynthetic rate, fruits could have higher sugar content. Increased carotenoid content could be used as a nutraceutical to produce foods with greater antioxidant capability.

[0434] G1792 or its equivalogs could be used to manipulate wax composition, amount, or distribution, which in turn could modify plant tolerance to drought and/or low humidity or resistance to insects, as well as plant appearance (shiny leaves). In particular, it would be interesting to see what the effect of increased wax deposition on leaves of a plant like cotton would do to drought resistance or water use efficiency. A possible application for this gene might be in reducing the wax coating on sunflower seeds (the wax fouls the oil extraction system during sunflower seed processing for oil). For this purpose, antisense or co-suppression of the gene in a tissue specific manner might be useful

[0435] G1792 equivalogs include, for example, Arabidopsis thaliana SEQ ID NO: 18 (G30), SEQ ID NO: 34 (G1791), and SEQ ID NO: 36 (G1795); Medicago truncatula SEQ ID NO: 160 (G3735); Glycine max SEQ ID NO: 82 (G3518), SEQ ID NO: 84 (G3519), SEQ ID NO: 86 (G3520); Oryza sativa (japonica cultivar-group) SEQ ID NO: 70 (G3380), SEQ ID NO: 72 (G3381), SEQ ID NO: 74 (G3383), SEQ ID NO: 76 (G3515), and SEQ ID NO: 164 (G3737); Zea mays), SEQ ID NO: 78 (G3516), SEQ ID NO: 80 (G3517), SEQ ID NO: 200 (G3794), SEQ ID NO: 166 (G3739) and Triticum aestivum SEQ ID NO: 162 (G3736).

G2053 (SEQ ID NO: 9 and 10)

Published Information

[0436] G2053 was identified in the sequence of BAC T27C4, GenBank accession number AC022287, released by the Arabidopsis Genome Initiative.

Experimental Observations

[0437] The function of G2053 was analyzed using transgenic plants in which the gene was expressed under the control of the 35S promoter. Overexpression of G2053 in Arabidopsis resulted in plants with altered osmotic stress tolerance. In a root growth assay on media containing high concentrations of PEG, G2053 overexpressors showed more root growth compared to wild-type controls (FIG. 29).

[0438] The osmotic stress tolerance assays suggested that this gene may confer drought tolerance, a supposition confirmed in soil-based assays in which G2053 overexpressors were significantly more drought tolerant than wild-type control plants (Tables 9 and 10).

Utilities

[0439] Based on the altered stress tolerance induced by G2053 overexpression, this transcription factor or its equivalogs could be used to alter a plant's response water deficit conditions and, therefore, could be used to engineer plants with enhanced tolerance to drought, salt stress, and freezing.

[0440] G2053 equivalogs include, for example, Arabidopsis thaliana SEQ ID NO: 20 (G515), SEQ ID NO: 22 (G516), and SEQ ID NO: 24 (G517)

G975 (SEQ ID NO: 237 and 238)

Published Information

[0441] After its discovery by us, G975 has appeared in the sequences released by the Arabidopsis Genome Initiative (BAC F9L1, GenBank accession number AC007591).

Closely Related Genes from Other Species

[0442] The non-Arabidopsis gene most highly related to G975 (as detected in BLAST searches, 11-5-99) is represented by L46408 BNAF1258 Mustard flower buds Brassica rapa cDNA clone F1258. The similarity between G975 and the Brassica rapa gene represented by EST L46408 extends beyond the conserved AP2 domain that characterizes the AP2/EREBP family. In fact, this Brassica rapa gene appears to be more closely related to G975 than Arabidopsis G1387, indicating that EST L46408 may represent a true G975 ortholog. The similarity between G975 and Arabidopsis G1387 also extends beyond the conserved AP2 domain.

Experimental Observations

[0443] G975 was discovered by us and is a new member of the AP2/EREBP family (EREBP subfamily) of transcription factors. G975 is expressed in flowers and, at lower levels, in shoots, leaves, and siliques. GC-FID and GC-MS analyses of leaves from G975 overexpressing plants have shown that the levels of C29, C31, and C33 alkanes were substantially increased (up to 10-fold) compared to control plants. A number of additional compounds of similar molecular weight, presumably also wax components, also accumulated to significantly higher levels in G975 overexpressing plants. Although total amounts of wax in G975 overexpressing plants have not yet been measured, C29 alkanes constitute close to 50% of the wax content in wild-type plants (Millar et al. (1998) Plant Cell 11: 1889-1902), indicating that a major increase in total wax content occurs in these transgenic plants. However, the transgenic plants had an almost normal phenotype (small morphological differences are detected in leaf appearance), indicating that overexpression of G975 is not deleterious to the plant. It is noteworthy that overexpression of G975 did not cause the dramatic alterations in plant morphology that have been reported for Arabidopsis plants in which the FATTY ACID ELONGATION1 gene was overexpressed (Millar et al. (1998) supra). G975 could specifically regulate the expression of some of the genes involved in wax metabolism. One Arabidopsis AP2 gene was found that is significantly more closely related to G975 than the rest of the members of the AP2/EREBP family. This other gene, G1387, may have a function, and therefore a utility, related to that of G975.

[0444] Plants overexpressing G975 were significantly larger and greener than wild-type control plants in a soil-based drought assay (Tables 9 and 10).

Utilities

[0445] G975 or its equivalogs could be used to improve a plant's tolerance to drought or low water conditions.

[0446] G975 or its equivalogs could be used to manipulate wax composition, amount, or distribution, which in turn could modify plant tolerance to drought and/or low humidity or resistance to insects, as well as plant appearance (shiny leaves). A possible application for this gene or its equivalogs might be in reducing the wax coating on sunflower seeds (the wax fouls the oil extraction system during sunflower seed processing for oil). For this purpose, antisense or co-suppression of the gene in a tissue specific manner might be useful.

[0447] G975 could also be used to specifically alter wax composition, amount, or distribution in those plants and crops from which wax is a valuable product.

G1069 (SEQ ID NO: 239 and 240)

Published Information

[0448] The sequence of G1069 was obtained from EU Arabidopsis sequencing project, GenBank accession number Z97336, based on its sequence similarity within the conserved domain to other AT-Hook related proteins in Arabidopsis.

Closely Related Genes from Other Species

[0449] G1069 protein shares a significant homology to a cDNA isolated from Lotus japonicus nodule library. Similarity between G1069 and the Lotus cDNA extends beyond the signature motif of the family to a level that would suggest the genes are orthologous. Therefore the gene represented by EST AW720668 may have a function and/or utility similar to that of G1069.

Experimental Observations

[0450] The sequence of G1069 was experimentally determined and the function of G1069 was analyzed using transgenic plants in which G1069 was expressed under the control of the 35S promoter.

[0451] Plants overexpressing G1069 showed changes in leaf architecture, reduced overall plant size, and retarded progression through the life cycle. This is a common phenomenon for most transgenic plants in which AT-HOOK proteins are overexpressed if the gene is predominantly expressed in root in the wild-type background. G1069 was predominantly expressed in roots, based on analysis of RT-PCR results. To minimize these detrimental effects, G1069 may be overexpressed under a tissue specific promoter such as root- or leaf-specific promoter or under inducible promoter.

[0452] One of G1069 overexpressing lines showed more tolerance to osmotic stress when they were germinated in high sucrose plates. This line also showed insensitivity to ABA in a germination assay.

[0453] The high sucrose and ABA assay results suggested that this gene may confer increased tolerance to other abiotic stresses when G1069 is overexpressed. This was subsequently confirmed in soil-based drought assays in which 35S::G1069 plants were more drought tolerant than wild-type control plants (Tables 9 and 10).

Utilities

[0454] The drought and osmotic stress results indicate that G1069 could be used to alter a plant's response to water deficit conditions and, therefore, the gene or its equivalogs could be used to engineer plants with enhanced tolerance to drought, salt stress, and freezing.

[0455] G1069 affects ABA sensitivity, and thus when transformed into a plant the gene or its equivalogs may diminish cold, drought, oxidative and other stress sensitivities, and also be used to alter plant architecture, and yield.

G916 (SEQ ED NO: 235 and 236)

Published Information

[0456] G916 corresponds to gene At4g04450, and it has also been described as WRKY42. No information is available about the function(s) of G916.

Experimental Observations

[0457] The complete cDNA sequence of G916 was experimentally determined. G916 appears to be expressed at low levels in a range of tissues, and was not significantly induced by any of the conditions tested.

[0458] A T-DNA insertion mutant for G916, displayed wild-type morphology. Overexpression of G916 produced a wide spectrum of developmental abnormalities in Arabidopsis. Many of the 35S::G916 seedlings were extremely tiny and showed an apparent lack of shoot organization. Such plants arrested growth and died at very early stages. Other individuals were small and displayed disproportionately long hypocotyls and narrow cotyledons. At later stages, the majority of surviving lines were markedly smaller than wild type, and formed rather weedy inflorescence stems that yielded very few flowers. Additionally, flowers often had poorly developed organs.

[0459] In addition, G916 overexpressing lines were larger than control wild-type seedlings in several germination assays. Larger seedlings were observed under conditions of high sucrose. In addition, 35S::G916 seedlings were larger and appeared to have less anthocyanin on high sucrose plates that were nitrogen deficient, with or without glutamine supplementation. The assays monitor the effect of C on N signaling through anthocyanin production. That 35S::G916 seedlings performed better under conditions of high sucrose alone makes it more difficult to interpret the better seedling performance under conditions of low nitrogen. Tissue specific or inducible expression of this gene could aid in sorting out the complex phenotypes caused by the constitutive overexpression of this gene.

[0460] The results of the high sucrose assays indicated that G916-overexpressing plants might be significantly more drought tolerant than control plants, which was subsequently confirmed in soil-based drought assays (Tables 9 and 10).

Utilities

[0461] The results of physiological assays indicate that G916 could be used to alter the sugar signaling in plants. The soil-based drought and sugar sensing assays indicate that G916 and its equivalogs may also be used to enhance a plant's drought or other osmotic stress tolerance.

[0462] The enhanced performance of G916 overexpression lines under low nitrogen conditions indicate that the gene could be used to engineer crops that could thrive under conditions of reduced nitrogen availability.

[0463] That 35S::G916 lines make less anthocyanin on high sucrose plus glutamine, indicates G916 might be used to modify carbon and nitrogen status, and hence assimilate partitioning.

[0464] Additionally, the morphological phenotypes shown by 35S::G916 seedlings indicate that the gene might be used to manipulate light responses such as shade avoidance.

G1820 (SEQ ID NO: 243 and 244)

Published Information

[0465] G1 820 is a member of the Hap5 subfamily of CCAAT-box-binding transcription factors. G1820 was identified as part of the BAC clone MBA10, accession number AB025619 released by the Arabidopsis Genome sequencing project.

Closely Related Genes from Other Species

[0466] G1820 is closely related to a soybean gene represented by EST335784 isolated from leaves infected with Colletotrichum trifolii. Similarity between G1820 and the soybean gene extends beyond the signature motif of the family to a level that would suggest the genes are orthologous. Therefore the gene represented by EST335784 may have a function and/or utility similar to that of G1820.

Experimental Observations

[0467] The complete sequence of G1820 was determined. The function of this gene was analyzed using transgenic plants in which G1820 was expressed under the control of the 35S promoter. G1820 overexpressing lines showed more tolerance to salt stress in a germination assay. They also showed insensitivity to ABA, with the three lines analyzed showing the phenotype. The salt and ABA phenotypes could be related to the plants' increased tolerance to osmotic stress, which was subsequently confirmed in soil-based drought assays in which 35S::G1820 plants were significantly more drought-tolerant than wild-type control plants (Tables 9 and 10).

[0468] Interestingly, overexpression of G1820 also consistently reduced the time to flowering. Under continuous light conditions at 20-25 C, the 35S::G1820 transformants displayed visible flower buds several days earlier than control plants. The primary shoots of these plants typically started flower initiation 1-4 leaf plastochrons sooner than those of wild type. Such effects were observed in all three T2 populations and in a substantial number of primary transformants.

[0469] When biochemical assays were performed, some changes in leaf fames were detected. In one line, an increase in the percentage of 18:3 and a decrease in 16:1 were observed. Otherwise, G1820 overexpressors behaved similarly to wild-type controls in all biochemical assays performed. As determined by RT-PCR, G1820 was highly expressed in embryos and siliques. No expression of G1820 was detected in the other tissues tested. G1820 expression appeared to be induced in rosette leaves by cold and drought stress treatments, and overexpressing lines showed tolerance to water deficit and high salt conditions.

[0470] One possible explanation for the complexity of the G1820 overexpression phenotype is that the gene is somehow involved in the cross talk between ABA and GA signal transduction pathways. It is well known that seed dormancy and germination are regulated by the plant hormones abscisic acid (ABA) and gibberellin (GA). These two hormones act antagonistically with each other. ABA induces seed dormancy in maturing embryos and inhibits germination of seeds. GA breaks seed dormancy and promotes germination. It is conceivable that the flowering time and ABA insensitive phenotypes observed in the G1820 overexpressors are related to an enhanced sensitivity to GA, or an increase in the level of GA, and that the phenotype of the overexpressors is unrelated to ABA. In Arabidopsis, GA is thought to be required to promote flowering in non-inductive photoperiods. However, the drought and salt tolerant phenotypes would indicate that ABA signal transduction is also perturbed in these plants. It seems counterintuitive for a plant with salt and drought tolerance to be ABA insensitive since ABA seems to activate signal transduction pathways involved in tolerance to salt and dehydration stresses. One explanation is that ABA levels in the G1820 overexpressors are also high but that the plant is unable to perceive or transduce the signal.

[0471] G1820 overexpressors also had decreased seed oil content and increased seed protein content compared to wild-type plants

Utilities

[0472] G1820 and its equivalogs may be used to enhance a plant's tolerance to drought conditions. The osmotic stress results indicated that G1820 or its equivalogs could be used to alter a plant's response to additional water deficit conditions and can be used to engineer plants with enhanced tolerance to salt stress, and freezing. Evaporation from the soil surface causes upward water movement and salt accumulation in the upper soil layer where the seeds are placed. Thus, germination normally takes place at a salt concentration much higher than the mean salt concentration of in the whole soil profile. Increased salt tolerance during the germination stage of a crop plant would impact survivability and yield.

[0473] G1820 affects ABA sensitivity, and thus when transformed into a plant this transcription factor or its equivalogs may diminish cold, drought, oxidative and other stress sensitivities, and also be used to alter plant architecture, and yield.

[0474] G1820 or its equivalogs could also be used to accelerate flowering time.

[0475] G1820 or its equivalogs may be used to modify levels of saturation in oils.

[0476] G1820 or its equivalogs may be used to seed protein content.

[0477] The promoter of G1820 could be used to drive seed-specific gene expression.

[0478] G1820 or equivalog overexpression may be used to alter seed protein content, which may be very important for the nutritional value and production of various food products

G2701 (SEQ ID NO: 245 and 246)

Published Information

[0479] G2701 was identified in the sequence of BAC F11B9, GenBank accession number AC073395, released by the Arabidopsis Genome Initiative.

Experimental Observations

[0480] The function of G2701 was analyzed using transgenic plants in which the gene was expressed under the control of the 35S promoter. Overexpression of G2701 is Arabidopsis resulted in plants that were wild-type in morphology and in the biochemical analyses performed. However, 35S::G2701 transgenic plants were more tolerant to osmotic stress in a germination assay, the seedlings were greener with expanded cotyledons and longer roots than wild-type controls when germinated on plates containing either high salt or high sucrose. The phenotype was repeated in all three lines.

[0481] The results of the high sucrose and salt assays suggested that this gene would confer increased tolerance to other abiotic stresses when G2701 is overexpressed, which was subsequently confirmed in soil-based drought assays, in which 35S::G2701 plants were significantly more drought tolerant than wild-type control plants (Tables 9 and 10).

[0482] G2701 was expressed ubiquitously in Arabidopsis according to RT-PCR, and the level of G2701 expression in leaf tissue was essentially unchanged in response to environmental stress related conditions.

Potential Applications

[0483] G2701 or its equivalogs could be used to alter a plant's response to water deficit conditions and therefore, could be used to engineer plants with enhanced tolerance to drought, salt stress, and freezing.

G2854 (SEQ ID NO: 251 and 256)

Published Information

[0484] The sequence of G2854 was obtained from the Arabidopsis genome sequencing project, GenBank accession number AL161566, nid=7269538, based on its sequence similarity within the conserved domain to other ACBF-like related proteins in Arabidopsis. To date, there is no published information regarding the functions of this gene.

[0485] Experimental Observations The 5′ and 3′ ends of G2854 were determined by RACE. The function of G2854 was analyzed using transgenic plants in which G2854 was expressed under the control of the 35S promoter. 35S::G2854 transformants showed increased germination efficiency on sucrose plates compared to wild-type controls. These results suggested a possible role for G2854 in conferring drought tolerance in plants. This supposition was confirmed in soil-based drought assays, in which plants overexpressing G2854 performed significantly better than wild-type plants (Tables 9 and 10).

Utilities

[0486] G2854 and its equivalogs may be used to confer improved drought tolerance in plants.

[0487] G2854 and its equivalogs might also be used to generate crop plants with altered sugar sensing. Sugars are key regulatory molecules that affect diverse processes in higher plants including germination, growth, flowering, senescence, sugar metabolism and photosynthesis. Sucrose is the major transport form of photosynthate and its flux through cells has been shown to affect gene expression and alter storage compound accumulation in seeds (source-sink relationships). Glucose-specific hexose-sensing has been described in plants and implicated in cell division and repression of ‘famine’ genes (photosynthetic or glyoxylate cycles). The potential utilities of a gene involved in glucose-specific sugar sensing are to alter energy balance, photosynthetic rate, carbohydrate accumulation, biomass production, source-sink relationships, and senescence.

G2789 (SEQ ID NO: 247 and 248)

Published Information

[0488] The sequence of G2789 was obtained from Arabidopsis genomic sequencing project, GenBank accession number AL162295, based on its sequence similarity within the conserved domain to other AT-hook related proteins in Arabidopsis. G2789 corresponds to gene T4C21_{—}280 (CAB82691). To date, there is no published information regarding the functions of this gene.

Closely Related Genes from Other Species

[0489] G2789 protein shows extensive sequence similarity with Medicago truncatula cDNA clones (AL366947 and BG647144), an Oryza sativa chromosome 6 clone (AP003526) and a tomato crown gall Lycopersicon esculentum cDNA clone (BG13445 1).

Exiperimental Observations

[0490] The complete sequence of G2789 was determined. G2789 is expressed at moderate levels in roots, flowers, embryos, siliques, and germinating seeds. It was not detectable in rosette leaves or shoots. No significant induction of G2789 was observed in rosette leaves by any condition tested.

[0491] The function of this gene was analyzed using transgenic plants in which G2789 was expressed under the control of the 35S promoter. Overexpression of G2789 in Arabidopsis resulted in seedlings that are ABA insensitive and osmotic stress tolerant. In a germination assay on ABA containing media, G2789 transgenic seedlings showed enhanced seedling vigor. In a similar germination assay on media containing high concentrations of sucrose, the G2789 overexpressors also showed enhanced seedling vigor. In a repeat experiment on individual lines, all three lines show the phenotype. The combination of ABA insensitivity and better germination under osmotic stress was also observed for G1820. It is possible that ABA insensitivity at the germination stage promotes germination despite unfavorable conditions.

[0492] The osmotic stress tolerance and enhanced seedling vigor on ABA phenotypes suggested that G2789 overexpressors would be more tolerant to drought conditions This supposition was confirmed by soil-based drought assays, in which plants overexpressing G2789 performed significantly better in conditions of water deprivation than wild-type plants (Tables 9 and 10).

Utilities

[0493] G2789 could be used to alter a plant's response to water deficit conditions and therefore, could be used to engineer plants with enhanced tolerance to drought, salt stress, and freezing.

G634 (SEQ ED NO: 231 and 232)

Published Information

[0494] G634 was initially identified as public partial cDNAs sequences for GTL1 and GTL2 which are splice variants of the same gene (Small et al (1998) Proc. Natl. Acad. Sci. U S A. 95:3318-3322). The published expression pattern of GTL1 shows that G634 is highly expressed in siliques and not expressed in leaves, stems, flowers or roots. There is no published information on the function of G634.

Closely Related Genes from Other Species

[0495] The closest non-Arabidopsis relative of G634 is the O. sativa gt-2 gene (EMBO J. (1992) 11:4131-4144), which is proposed to bind and regulate the phyA promoter. In addition, the pea DNA-binding protein DF1 (13786451) shows strong homology to G634. The homology of these proteins to G634 extends to outside of the conserved domains and thus these genes are likely to be orthologs of G634.

Experimental Observations

[0496] The boundaries of G634 in were experimentally determined and the function of G634 was investigated by constitutively expressing G634 using the CaMV 35S promoter.

[0497] Three constructs were made for G634: P324, P1374 and P1717. P324 was found to encode a truncated protein. P1374 and P1717 represent full length splice variants of G634; P1374, the shorter of the two splice variants was used for the experiments described here. The longest available cDNA (P1717), confirmed by RACE, has the same ATG and stop codons as the genomic sequence.

[0498] Plants overexpressing G634 from construct P1374 showed a dramatic increase the density of trichomes, which additionally appear larger in size. The increase in trichome density was most noticeable on later arising rosette leaves, cauline leaves, inflorescence stems and sepals with the stem trichomes being more highly branched than controls. Approximately half of the primary transformants and two of three T2 lines showed the phenotype. Apart from slight smallness, there did not appear to be any other clear phenotype associated with the overexpression of G634. However, a reduction in germination was observed in T2 seeds grown in culture. It is not clear whether this defect was due to the quality of the seed lot tested or whether this characteristic is related to the transgene overexpression.

[0499] RT PCR data showed that G634 is potentially preferentially expressed in flowers and germinating seedlings, and induced by auxin. The role of auxin in trichome initiation and development has not been established in the published literature.

[0500] The increase in trichome density observed in G634 overexpressors suggested a possible role for this gene in drought-stress tolerance, a presumption subsequently confirmed in soil-based drought assays (Tables 9 and 10).

Utilities

[0501] Trichome glands on the surface of many higher plants produce and secrete exudates that give protection from the elements and pests such as insects, microbes and herbivores. These exudates may physically immobilize insects and spores, may be insecticidal or ant-microbial or they may allergens or irritants to protect against herbivores. Trichomes have also been suggested to decrease transpiration by decreasing leaf surface air flow, and by exuding chemicals that protect the leaf from the sun.

[0502] Depending on the plant species, varying amounts of diverse secondary biochemicals (often lipophilic terpenes) are produced and exuded or volatilized by trichomes. These exotic secondary biochemicals, which are relatively easy to extract because they are on the surface of the leaf, have been widely used in such products as flavors and aromas, drugs, pesticides and cosmetics. One class of secondary metabolites, the diterpenes, can effect several biological systems such as tumor progression, prostaglandin synthesis and tissue inflammation. In addition, diterpenes can act as insect pheromones, termite allomones, and can exhibit neurotoxic, cytotoxic and antimitotic activities. As a result of this functional diversity, diterpenes have been the target of research several pharmaceutical ventures. In most cases where the metabolic pathways are impossible to engineer, increasing trichome density or size on leaves may be the only way to increase plant productivity.

[0503] Thus, the use of G634 and its equivalogs to increase trichome density, size or type may therefore have profound utilities in so called molecular farming practices (i.e. the use of trichomes as a manufacturing system for complex secondary metabolites), and in producing resistant insect and herbivore resistant plants.

[0504] G634 and its equivalogs may also be used to increase the drought tolerance of plants.

G175 (SEQ ID NO: 223 and 224)

Published Information

[0505] G175 was identified in the sequence of P1 clone M3E9 (Gene AT4g26440/M3E9.130; GenBank accession number CAB79499). No information is available about the function(s) of G175.

Closely Related Genes from Other Species

[0506] The non-Arabidopsis most highly related gene to G175 is Nicotiana tabacum NtWRKY4 (as identified by BLAST searches; GenBank accession number BAA8603 1). Similarly between G175 and the tobacco gene extends beyond the signature motif of the family to a level that would suggest that the genes might be orthologs. Therefore NtWRKY4 may have a function and/or utility similar to that of G175. No further information is available about NtWRKY4.

Experimental Observations

[0507] The complete cDNA sequence of G175 was determined by us. The function of this gene was studied using transgenic plants in which G175 was expressed under the control of the 35S promoter. 35S::G175 plants are more tolerant to osmotic stress conditions (better germination in NaCl and sucrose containing media). The plants were otherwise wild-type in morphology and development.

[0508] G175 appears to be specifically expressed in floral tissues, and also appears to be induced elsewhere by heat and salt stress.

[0509] The results of the osmotic stress assays and heat and salt stress expression analyses suggested that G175 could be used to confer drought tolerance in plants, a supposition that was confirmed in soil-based assays in which G175-overexpressing plants were shown to be more tolerant to water deprivation than wild-type control plants (Tables 9 and 10).

Utilities

[0510] G175 and its equivalogs can be used to improve drought tolerance and increase germination under adverse osmotic stress conditions, which could impact survivability and yield. The promoter of G175 could also be used to drive flower specific expression.

G2839 (SEQ ID NO: 249 and 250)

Published Information

[0511] G2839 (At3g46080) was identified in the sequence of BAC F12M12 (GenBank accession number AL355775) based on its sequence similarity within the conserved domain to other C2H2 related proteins in Arabidopsis. There is no published or public information about the function of G2839.

Experimental Observations

[0512] The function of G2839 was studied using transgenic plants in which the gene was expressed under the control of the 35 S promoter. Few primary transformants were generated, suggesting that G2839 overexpression can be lethal. T1 lines displayed stunted growth and development, and yielded very few or zero seeds. Inflorescences were poorly developed. In one line, flower pedicels were very short and flowers and siliques were oriented downwards. G2839 overexpressors showed a phenotype in a germination assay on media containing high sucrose: seedlings were green and had high germination rates. Thus, the gene appeared to influence sugar sensing and/or osmotic stress responses.

[0513] G2839 is similar to two other Arabidopsis sequences, G354 and G353. Flower phenotypes in which pedicels were very short and flowers and siliques were oriented downwards have been described for G353 and G354 and are also similar to the brevipedicellus mutant (Koomneef et al. (1983) J. Hered. 74: 265-272; Venglat et al. (2002) Proc. Natl. Acad. Sci. USA. 99:4730-4735; Douglas et al. (2002) Plant Cell. 14:547-558. Interestingly 35S::G353 lines also showed increased resistance to osmotic stress.

[0514] Supplementing the results of the high sucrose germination assay, G2839 was shown to be more tolerant to water deprivation than wild-type control plants in soil-based drought assays (Tables 9 and 10).

Utilities

[0515] The phenotypes observed in physiology assays indicate that G2839 might be used to generate crop plants with altered sugar sensing. Since the gene appears to be associated with the response to osmotic stress, the gene could be used to engineer cold and dehydration tolerance. The latter was confirmed by the soil-based drought assay.

[0516] The morphological phenotype shown by 35S::G2839 lines indicate that the gene might be used to alter inflorescence architecture. In particular, a reduction in pedicel length and a change in the position at which flowers and fruits are held, might influence harvesting or pollination efficiency. Additionally, such changes might produce attractive novel forms for the ornamental markets.

G1452 (SEQ ID NO: 241 and 242)

Published Information

[0517] G1452 was identified in the sequence of clones T22013, F12K2 with accession number AC006233 released by the Arabidopsis Genome Initiative. No information is available about the function(s) of G1452.

Closely Related Genes from Other Species

[0518] G1452 does not show extensive sequence similarity with known genes from other plant species outside of the conserved NAC domain.

Experimental Observations

[0519] The function of G1452 was analyzed using transgenic plants in which the gene was expressed under the control of the 35S promoter.

[0520] Overexpression of G1452 produced changes in leaf development and markedly delayed the onset of flowering. 35S::G1452 plants produced dark green, flat, rounded leaves, and typically formed flower buds between 2 and 14 days later than controls. Additionally, some of the transformants were noted to have rather low trichome density on leaves and stems. At later stages of life cycle, 35S::G1452 appeared to develop slowly and senesced considerably later than wild-type controls.

[0521] G1452 overexpressors were more tolerant to high sucrose-induced osmotic stress than wild-type control plants, were more tolerant to high salt than controls, and were insensitive to ABA in separate germination assays. These results suggested that G1452 may be used to confer improved survival in drought, which was confirmed in soil-based drought assays where G1452-overexpressors fared significantly better than wild-type control plants (Tables 9 and 10).

Utilities

[0522] G1452 could be used to alter a plant's response to water deficit conditions and therefore, could be used to engineer plants with enhanced tolerance to drought and salt stress.

[0523] On the basis of the analyses performed to date, G1452 could be use to alter plant growth and development.

G3083 (SEQ ID NO: 253 and 254)

Published Information

[0524] G3083 (At3g14880) was identified as part of the BAC clone K15M2, GenBank accession number AP000370 (nid=5541653). No published information is available on the function of G3083.

Experimental Observations

[0525] The 5′- and 3′-ends of G3083 were determined by RACE and the function of the gene was assessed by analysis of transgenic Arabidopsis lines in which a genomic clone was constitutively expressed from a 35S promoter. 35S::G3083 plants were indistinguishable from wild-type controls in the morphological analysis.

[0526] In the physiological analysis, two out of the three 35S::G3083 lines tested, displayed an enhanced ability to germinate on plates containing high levels of sodium chloride. This suggested that G3083 might function as part of a response pathway to abiotic stress, which was further indicated in soil-based drought assays in which one line of a G3083 overexpressor was shown to be significantly more tolerant to water deprivation than wild-type control plants.

Utilities

[0527] Based on the increased salt tolerance exhibited by the 35S::G3083 lines in physiology assays, this gene might be used to engineer salt tolerant crops and trees that can flourish in drought or in salinified soils. The latter condition is of particular importance early in the lifecycle, since evaporation from the soil surface causes upward water movement, and salt accumulates in the upper soil layer where the seeds are placed. Thus, germination normally takes place at a salt concentration much higher than the mean salt level in the whole soil profile. Increased salt tolerance during the germination stage of a crop plant would therefore enhance survivability and yield.

G489 (SEQ ED NO: 229 and 230)

Published Information

[0528] G489 was identified from a BAC sequence that showed high sequence homology to AtHAP5-like transcription factors in Arabidopsis. No published information is available regarding the function of this gene.

Closely Related Genes from Other Species

[0529] G489 has no significant homology to any other non-Arabidopsis plant protein in the database outside the conserved domain.

Experimental Observations

[0530] The function of G489 was analyzed through its ectopic overexpression in plants.

[0531] RT-PCR analysis of endogenous levels of G489 transcripts indicates that this gene is expressed constitutively in all tissues tested. A cDNA array experiment confirms the RT-PCR derived tissue distribution data. G489 was not induced above basal levels in response to the stress treatments tested.

[0532] G489 overexpressors were more tolerant to high NaCl stress, showing more root growth and leaf expansion compared to the controls in culture. Two well characterized ways in which NaCl toxicity is manifested in the plant is through general osmotic stress and potassium deficiency due to the inhibition of its transport. These lines were more tolerant to osmotic stress, showing more root growth on mannitol containing media; however, they were not more tolerant to potassium deficiency.

[0533] The involvement of G489 in a response pathway to abiotic stress was further confirmed in soil-based drought assays, where the overexpressors were observed to be more tolerant to water deprivation conditions than wild-type control plants (Table 10).

Utilities

[0534] The potential utilities of this gene include the ability to confer drought and salt tolerance during the growth and developmental stages of a crop plant. This would most likely impact yield and or biomass.

G303 (SEQ ED NO: 225 and 226)

Published Information

[0535] G303 corresponds to gene MNA5.5 (BAB11554.1). There is no published information regarding the functions of this gene.

Closely Related Genes from Other Species

[0536] G303 does not show extensive sequence similarity with known genes from other plant species outside of the conserved basic HLH domain.

Experimental Observations

[0537] The complete sequence of G303 was determined. G303 was detected at very low levels in roots and rosette leaves. It did not appear to be induced by any condition tested. No altered morphological or biochemical phenotypes were detected in G303 overexpressing plants.

[0538] The function of this gene was analyzed using transgenic plants in which G303 was expressed under the control of the 35S promoter. G303 overexpressing plants showed more tolerance to osmotic stress vigor than wild-type controls in a germination assay in three separate experiments on high salt and high sucrose.

[0539] The involvement of G303 in a response pathway to abiotic stress was further confirmed in soil-based drought assays, in which the plants overexpressing G303 were found to be more tolerant to drought than the wild-type controls in the experiment (Table 10).

Utilities

[0540] G303 may be useful for enhancing drought tolerance and seed germination under high salt conditions or other conditions of osmotic stress (e.g., freezing).

G2992 (SEQ ED NO: 49 and 50)

Published Information

[0541] G2992 corresponds to gene F24J1.29 within BAC clone F24J1 (GenBank accession AC021046) derived from chromosome 1. We identified this locus as a novel member of the ZF-HB family and no data regarding its function are currently in the public domain (as of 8/5/02).

Experimental Observations

[0542] The boundaries of G2992 were determined by RACE, and a clone was PCR-amplified from cDNA derived from mixed tissue samples. The function of G2992 was then assessed by analysis of transgenic Arabidopsis lines in which the cDNA was constitutively expressed from a 35S CaMV promoter.

[0543] Morphological studies revealed that overexpression of G2992 can accelerate the onset of reproductive development, reduce plant size, and produce changes in leaf shape.

[0544] 35S::G2992 T2 populations displayed an enhanced ability to germinate on plates containing high levels of sodium chloride. The role of G2992 in a response pathway to abiotic stress was affirmed by a soil-based drought assay, in which it was shown that G2992 overexpressors were, on average, more tolerant to water deprivation conditions in soil-based drought assays than wild-type plants (Table 10), and one of the lines tested was significantly more drought tolerant than the wild-type controls.

Utilities

[0545] Based on the phenotypes observed in morphological and physiological assays, G2992 might be have a number of applications.

[0546] Given the drought and salt tolerance exhibited by 35S::G2992 transformants, the gene and its equivalogs might be used to engineer drought and salt tolerant crops and trees that can flourish in drought conditions and salinified soils.

[0547] The early flowering exhibited by 35S::G2992 lines, indicates that the gene might be used to manipulate flowering time in commercial species. In particular, G2992 could be applied to accelerate flowering or eliminate any requirements for vernalization. In some instances, a faster cycling time might allow additional harvests of a crop to be made within a given growing season. Shortening generation times could also help speed-up breeding programs, particularly in species such as trees, which typically grow for many years before flowering. Conversely, it might be possible to modify the activity of G2992 (or its equivalogs) to delay flowering in order to achieve an increase in biomass and yield.

[0548] Finally, the effects of G2992 overexpression on leaf shape suggest that the gene might be used to modify plant architecture.

G682 (SEQ ID NO: 233 and 234)

Published Information

[0549] G682 was identified from the Arabidopsis BAC, AF007269, based on sequence similarity to other members of the Myb family within the conserved domain. To date, no functional data is available for this gene.

Closely Related Genes from Other Species

[0550] G682 has no significant homology to any other non-Arabidopsis plant protein in the database outside the conserved Myb domain.

Experimental Observations

[0551] The function of G682 was analyzed through its ectopic overexpression in plants.

[0552] RT-PCR analysis of the endogenous levels of G682 transcripts indicated that this gene is expressed in all tissues tested, however, a very low level of transcript is detected in roots and shoots. Array tissue print data suggests that G682 is expressed primarily, but not exclusively, in flower tissue.

[0553] An array experiment was performed on G682 overexpressing line 5. The data from this one experiment indicates that this gene could be a negative regulator of chloroplast development and/or light dependent development because the gene Albino3 and many chloroplast genes are repressed. Albino3 functions to regulate chloroplast development (Plant Cell (1997) 9: 717-730). The gene G682 is itself is induced 20-fold. Other than a few additional transcription factors, very few genes are induced as a result of the ectopic expression of G682. These plants are not pale in color, making it uncertain how to relate the morphological and physiological data with the gene profiling data. The array experiment needs to be repeated with additional lines.

[0554] G682 overexpressors are glabrous, have tufts of more root hairs and germinated better under heat stress conditions. Older plants were not more tolerant to heat stress compared to wild-type controls. At the time these experiments were performed, it was suggested that further experiments were needed to address whether or not the heat germination phenotype of the G682 overexpressors was related to water deficit stress tolerance in the germinating seedling, and correlated with a possible drought tolerance phenotype. More recent experiments have shown that G682 overexpressors were, on average, more tolerant to water deprivation conditions in soil-based drought assays than wild-type plants (Table 10), and two of three lines were significantly more drought tolerant than the wild-type controls.

Utilities

[0555] The utility of this gene and its equivalogs would be to confer heat tolerance to germinating seeds and drought tolerance in plants.

G1073 (SEQ ID NO: 301 and 302), AtHRC1

Published Information

[0556] G1073 has been identified in the sequence of a BAC clone from chromosome 4 (BAC clone F23E12, gene F23E12.50, GenBank accession number AL022604), released by EU Arabidopsis Sequencing Project.

Closely Related Genes from Other Species

[0557] G1073 has similarity to Medicago truncatula cDNA clones (GenBank accession number AW574000 and AW560824) and Glycine max cDNA clones (AW349284 and AM736668 ) in the database.

Experimental Observations, Increased Biomass and Size and Other Observations

[0558] The function of G1073 was analyzed using transgenic plants in which G1073 was expressed under the control of the cauliflower mosaic virus 35S promoter (these transgenic plants are referred to as “35S::G1073”). Transgenic plants overexpressing G1073 were substantially larger than wild-type controls, with at least a 60% increase in biomass (Table 8) . The increased mass of 35S::G1073 transgenic plants was attributed to enlargement of multiple organ types including stems, roots and floral organs; other than the size differences, these organs were not affected in their overall morphology. 35S::G1073 plants exhibited an increase of the width (but not length) of mature leaf organs, produced 2-3 more rosette leaves, and had enlarged cauline leaves in comparison to corresponding wild-type leaves. Overexpression of G1073 resulted in an increase in both leaf mass and leaf area per plant, and leaf morphology (G1073 overexpressors tended to produce more serrated leaves). We also found that root mass was increased in the transgenic plants, and that floral organs were also enlarged. An increase of approximately 40% in stem diameter was observed in the transgenic plants. Images from the stem cross-sections of 35S::G1073 plants revealed that cortical cells are large and that vascular bundles contained more cells in the phloem and xylem relative to wild type. Petal size in the 35S::G1073 lines was increased by 40-50% compared to wild type controls. Petal epidermal cells in those same lines were approximately 25-30% larger than those of the control plants. Furthermore, 15-20% more epidermal cells per petal were produced compared to wild type. Thus, in petals and stems, the increase in size was associated with an increase in cell size as well as in cell number.

[0559] Seed yield was also increased compared to control plants. 5S::G1073 lines showed an increase of at least 70% in seed yield (Table 8). This increased seed production was associated with an increased number of siliques per plant, rather than seeds per silique.

TABLE 8
Comparison of biomass and seed yield production in Arabidopsis
wild-type and two 35S::G1073 overexpressing lines

| Line | Fresh Weight (g) | Dry Weight (g) | Seed (g) |
|---|---|---|---|
| Wild-type | 3.43 ± 0.70 | 0.73 ± 0.20 | 0.17 ± 0.07 |
| 35S::G1073-3 | 5.74 ± 1.74 | 1.17 ± 0.30 | 0.31 ± 0.08 |
| 35S::G1073-4 | 6.54 ± 2.19 | 1.38 ± 0.44 | 0.35 ± 0.12 |

[0560] All 35S::G1073 lines tested (10/10) exhibited significantly improved salt tolerance. Most of these lines also showed a sugar sensing phenotype, exhibiting improved germination on high sucrose media. One line showed increased heat germination tolerance. Flowering of G1073 overexpressing plants was delayed. Leaves of G1073 overexpressing plants were generally more serrated than those of wild-type plants. Improved drought tolerance was observed in 35S::G1073 transgenic lines.

[0561] A number of the CUT1::G1073 lines tested exhibited significantly improved salt tolerance and sugar sensing on high sucrose. One line showed improved germination on high mannitol.

[0562] Half of the ARSK::G1073 lines tested (5/10) showed improved germination on high salt, and two lines showed improved germination in cold relative to controls.

Utilities of G1073

[0563] Large size and late flowering produced as a result of G1073 or equivalog overexpression would be extremely useful in crops where the vegetative portion of the plant is the marketable portion (often vegetative growth stops when plants make the transition to flowering). In this case, it would be advantageous to prevent or delay flowering with the use of this gene or its equivalogs in order to increase yield (biomass). Prevention of flowering by this gene or its equivalogs would be useful in these same crops in order to prevent the spread of transgenic pollen and/or to prevent seed set. This gene or its equivalogs could also be used to manipulate leaf shape, abiotic stress tolerance, including drought and salt tolerance, and seed yield.

Rice Sequences G3399 and G3407 (SEQ ID NOs: 341, 342, 355 and 356), OsHRC2 and OsHRC7

Published Information

[0564] The sequences of G3399 and G3407 were discovered based on their similarity to G1073 as determined by BLAST analysis of a proprietary database, To date, there is no published information regarding the functions of either gene or polypeptide.

Experimental Observations

[0565] A number of Arabidopsis lines overexpressing G3399 and G3407 under the control of the 35S promoter were found be larger, with broader leaves and larger rosettes than wild-type control plants.

Utilities of G3399 and G3407

[0566] G3399 and G3407 could be used to increase a plant's biomass.

[0567] G3399 and G3407 may be also used to alter a plant's response to water deficit conditions and, therefore, could be used to engineer plants with enhanced tolerance to drought, salt stress, and freezing.

Soybean Sequences G3456,G3459 and G3460 (SEQ ID NOs: 385, 386, 389, 390, 391 and 392), GmHRC2, GmHRC7 and GmHRC8

Published Information

[0568] The sequences of G3456,G3459 and G3460 were discovered based on their similarity to G1073 as determined by BLAST analysis of a proprietary database, To date, there is no published information regarding the functions of either gene or polypeptide.

Experimental Observations

[0569] A significant number of Arabidopsis lines overexpressing G3456,G3459 and G3460 under the control of the 35S promoter were found be larger, with broader leaves and larger rosettes than wild-type control plants.

Utilities of G3456, G3459 and G3460

[0570] G3456, G3459 and G3460 can be used to increase a plant's biomass.

[0571] G3456, G3459 and G3460 may be also used to alter a plant's response to water deficit conditions and, therefore, could be used to engineer plants with enhanced tolerance to drought, salt stress, and freezing.

G481 (Polynucleotide SEQ ID NO: 289 and 290)

Published Information

[0572] G481 is equivalent to AtHAP3a which was identified by Edwards et al., ((1998) Plant Physiol. 117: 1015-1022) as an EST with extensive sequence homology to the yeast HAP3. Northern blot data from five different tissue samples indicates that G481 is primarily expressed in flower and/or silique, and root tissue. No other functional data is available for G481 in Arabidopsis.

Closely Related Genes from Other Species

[0573] There are several genes in the database from higher plants that show significant homology to G481 including, X59714 from corn, and two ESTs from tomato, AI486503 and AI782351.

Experimental Observations

[0574] The function of G481 was analyzed through its ectopic overexpression in plants. Except for darker color in one line (noted below), plants overexpressing G481 had a wild-type morphology. G481 overexpressors were found to be more tolerant to high sucrose and high salt, having better germination, longer radicles, and more cotyledon expansion. There was a consistent difference in the hypocotyl and root elongation in the overexpressor compared to wild-type controls. These results indicated that G481 is involved in sucrose-specific sugar sensing. Sucrose-sensing has been implicated in the regulation of source-sink relationships in plants.

[0575] In the T2 generation, one overexpressing line was darker green than wild-type plants, which may indicate a higher photosynthetic rate that would be consistent with the role of G481 in sugar sensing.

[0576] 35S::G481 plants were also significantly larger and greener in a soil-based drought assay than wild-type controls plants After eight days of drought treatment overexpressing lines had a darker green and less withered appearance than those in the control group. The differences in appearance between the control and G481-overexpressing plants after they were rewatered was even more striking. Eleven of twelve plants of this set of control plants died after rewatering, indicating the inability to recover following severe water deprivation, whereas all nine of the overexpressor plants of the line shown recovered from this drought treatment. These results were typical of a number of control and 35S::G481-overexpressing lines.

[0577] One line of plants in which G481 was overexpressed under the control of the ARSKl root-specific promoter was found to germinate better under cold conditions than wild-type plants.

[0578] Interestingly, in one Arabidopsis line in which G481 was knocked out, the plants were found to be more sensitive to high salt in a plate-based assay than wild-type plants, which indicates the importance of the role played by G481 in regulating osmotic stress tolerance, and demonstrates that the gene is both necessary and sufficient to fulfill that function.

[0579] A number of the 35S::G481 plants evaluated had a late flowering phenotype.

Utilities

[0580] The potential utility of G481 includes altering photosynthetic rate, which could also impact yield in vegetative tissues as well as seed. Sugars are key regulatory molecules that affect diverse processes in higher plants including germination, growth, flowering, senescence, sugar metabolism and photosynthesis. Sucrose is the major transport form of photosynthate and its flux through cells has been shown to affect gene expression and alter storage compound accumulation in seeds (source-sink relationships).

[0581] Since G481 overexpressing plants performed better than controls in drought experiments, this gene or its equivalogs may be used to improve seedling vigor, plant survival, as well as yield, quality, and range.

G482 (Polynucleotide SEQ ID NO: 291 and 292)

Published Information

[0582] G482, a paralog of G481, is equivalent to AtHAP3b which was identified by Edwards et al. (1998) Plant Physiol. 117: 1015-1022) as an EST with homology to the yeast gene HAP3b. Their northern blot data suggests that AtHAP3b is expressed primarily in roots. No other functional information regarding G482 is publicly available.

Closely Related Genes from Other Species

[0583] The closest homology in the non-Arabidopsis plant database is within the B domain of G482, and therefore no potentially orthologous genes are available in the public domain.

Experimental Observations

[0584] RT-PCR analysis of endogenous levels of G482 transcripts indicated that this gene is expressed constitutively in all tissues tested. A cDNA array experiment supports the RT-PCR derived tissue distribution data. G482 is not induced above basal levels in response to any environmental stress treatments tested.

[0585] A T-DNA insertion mutant for G482 was analyzed and was found to flower slightly later than control plants.

[0586] The function of G482 was also analyzed through its ectopic overexpression in plants. Plants overexpressing G482 had a wild-type morphology. Germination assays to measure salt tolerance demonstrated increased seedling growth when germinated on the high salt medium.

[0587] 35S::G482 transgenic plants also displayed an osmotic stress response phenotype similar to 35S::G481 transgenic lines. Five of ten overexpressing lines had increased seedling growth on medium containing 80% MS plus vitamins with 300 mM mannitol.

[0588] Three of ten 35S::G482 lines also demonstrated enhanced germination relative to controls after a 6 hour exposure to 32° C.

[0589] The majority of these 35S::G482 lines also demonstrated a slightly early flowering phenotype.

Utilities

[0590] The potential utilities of this gene include the ability to confer osmotic stress tolerance, as measured by salt, heat tolerance and improved germination in mannitol-containing media, during the germination stage of a crop plant. This would most likely impact survivability and yield. Evaporation of water from the soil surface causes upward water movement and salt accumulation in the upper soil layer, where the seeds are placed. Thus, germination normally takes place at a salt concentration much higher than the mean salt concentration in the whole soil profile.

[0591] Improved osmotic stress tolerance is also likely to result in enhanced seedling vigor, plant survival, improved yield, quality, and range. Osmotic stress assays, including subjecting plants to aqueous dissolved sugars, are often used as surrogate assays for improved water-stress (e.g., drought) response. Thus, G482 may also be used to improve plant performance under conditions of water deprivation, including increased seedling vigor, plant survival, yield, quality, and range.

Rice G3395 and Soy G3470 (Polynucleotide SEQ ID NOs: 333 and 395, Respectively, and Polypeptide SEQ ID NOs: 334 and 396, Respectively)

Published Information

[0592] G3395 (rice) and G3470 (soybean) are orthologs of G481 and G482, and are members of the HAP3-like subfamily of CCAAT-box binding transcription factors. G3395 corresponds to polypeptide BAC76331 (“NF-YB subunit of rice”).

Experimental Observations

[0593] The functions of G3395 and G3470 were analyzed through their ectopic overexpression in plants. One of the lines of 35S::G3395 overexpressors tested was found to be more tolerant to high salt levels, producing larger and greener seedlings in a high salt germination assay.

[0594] Seven of ten lines of 35S::G3470 overexpressors were found to be significantly more tolerant to high salt in a plate-based germination assay.

Utilities

[0595] The potential utilities of these two genes, G3395 and G3470, and their equivalogs, include the ability to confer tolerance to drought and other osmotic stresses, including during the germination stage of a crop plant. Equivalogs of G3395 and G3470 include, for example, Arabidopsis sequences G481 (SEQ ID NO: 290), G482 (SEQ ID NO: 292), G485 (SEQ ID NO: 294), G486 (SEQ ID NO: 296), G1248 (SEQ ID NO: 308), G1364 (SEQ ID NO: 310), G1781 (SEQ ID NO: 312), G2345 (SEQ ID NO: 322), G2718 (SEQ ID NO: 326), rice sequences G3394 (SEQ ID NO: 332), G3396 (SEQ ID NO: 336), G3397 (SEQ ID NO: 338), G3398 (SEQ ID NO: 340), G3429 (SEQ ID NO: 360), G3835 (SEQ ID NO: 416), G3836 (SEQ ID NO: 418), corn sequences G3434 (SEQ ID NO: 364), G3435 (SEQ ID NO: 366), G3436 (SEQ ID NO: 368), G3437 (SEQ ID NO: 370), and soy sequences G3470 (SEQ ID NO: 396), G3471 (SEQ ID NO: 398), G3472 (SEQ ID NO: 400), G3473 (SEQ ID NO: 402), G3474 (SEQ ID NO: 404), G3475 (SEQ ID NO: 406), G3476 (SEQ ID NO: 408), G3477 (SEQ ID NO: 410), G3478 (SEQ ID NO: 412), and G3837 (SEQ ID NO: 420).

[0596] Table 9 presents the results obtained in an assay in which Arabidopsis plants were subjected to water deprivation for seven to eight days. At the end of this dry-down period, each pot was assigned a numeric score depending on the health of its plants. A score of 0 to 6 was assigned based on a plant's color and general appearance, with plants that were all brown receiving a “0” and, at the other end of the spectrum, plants that had an excellent appearance (all green) receiving a “6“. The mean of the recorded numeric score of all pots of a given genotype per line of all flats tested is presented in order of decreasing health.

TABLE 9
Comparison of recorded numeric score
plants subjected to drought treatment.

| GID | Mean score |
|---|---|
| G2133 | 5.875 |
| G634 | 4.778 |
| G922 | 4.667 |
| G916 | 4.6 |
| G1274 | 4.273 |
| G864 | 3.733 |
| G2999 | 3.7 |
| G2992 | 3.7 |
| G353 | 3.6 |
| G47 | 3.459 |
| G2053 | 3.404 |
| G975 | 3.393 |
| G489 | 3.364 |
| G1792 | 3.281 |
| G1820 | 3.2 |
| G2453 | 3.2 |
| G2140 | 3.139 |
| G2701 | 3.108 |
| G3086 | 3.056 |
| G611 | 3.048 |
| G1452 | 3.042 |
| G481 | 3.041 |
| G624 | 3.000 |
| G2854 | 2.829 |
| G303 | 2.812 |
| G2839 | 2.783 |
| G2789 | 2.708 |
| G188 | 2.692 |
| G325 | 2.556 |
| G2776 | 2.513 |
| G175 | 2.467 |
| G2110 | 2.432 |
| G1206 | 2.412 |
| G682 | 2.381 |
| G1730 | 2.341 |
| G2969 | 2.333 |
| G2998 | 2.333 |
| G1069 | 2.316 |
| Wild-type | 2.284 |

[0597] Table 10 compares the survival ratings of Arabidopsis plants overexpressing various polypeptides, evaluated after seven to eight days of drought treatment, rewatering, and two to three days of a recovery period Values indicate the median odds of survival within a given flat (the 50th percentile of survival within each pot of a given genotype per line divided by the average wild-type survival in the flat).

TABLE 10
Survival ratings of Arabidopsis plants after
drought and rewatering treatment

| | Median per |
|---|---|
| GID | flat |
| G2133 | 3.365 |
| G1274 | 2.059 |
| G922 | 1.406 |
| G2999 | 1.255 |
| G3086 | 1.179 |
| G354 | 1.167 |
| G1792 | 1.161 |
| G2053 | 1.091 |
| G975 | 1.090 |
| G1069 | 1.037 |
| G916 | 1.023 |
| G2701 | 1.000 |
| G1820 | 1.000 |
| G47 | 0.921 |
| G2854 | 0.889 |
| G2789 | 0.845 |
| G481 | 0.843 |
| G634 | 0.834 |
| G175 | 0.814 |
| G2839 | 0.805 |
| G1452 | 0.803 |
| Wild-type | 0.800 |

### Example X

### Identification of Homologous Sequences

[0598] This example describes identification of genes that are orthologous to Arabidopsis thaliana transcription factors from a computer homology search.

[0599] Homologous sequences, including those of paralogs and orthologs from Arabidopsis and other plant species, were identified using database sequence search tools, such as the Basic Local Alignment Search Tool (BLAST) (Altschul et al. (1990) J. Mol. Biol. 215: 403-410; and Altschul et al. (1997) Nucleic Acid Res. 25: 3389-3402). The tblastx sequence analysis programs were employed using the BLOSUM-62 scoring matrix (Henikoff and Henikoff (1992) Proc. Natl. Acad. Sci. 89: 10915-10919). The entire NCBI GenBank database was filtered for sequences from all plants except Arabidopsis thaliana by selecting all entries in the NCBI GenBank database associated with NCBI taxonomic ID 33090 (Viridiplantae; all plants) and excluding entries associated with taxonomic ID 3701 (Arabidopsis thaliana).

[0600] These sequences are compared to sequences representing genes of the invention, for example, SEQ ID NO: 1, 11, 87, 89, 91, 93, 95, 97, 99, using the Washington University TBLASTX algorithm (version 2.0a19MP) at the default settings using gapped alignments with the filter “off”. For each gene of the invention, for example, SEQ ID NO: 1, 11, 87, 89, 91, 93, 95, 97, 99, individual comparisons were ordered by probability score (P-value), where the score reflects the probability that a particular alignment occurred by chance. For example, a score of 3.6E40 is 3.6×10-40. In addition to P-values, comparisons were also scored by percentage identity. Percentage identity reflects the degree to which two segments of DNA or protein are identical over a particular length. Examples of sequences so identified are presented in Table 6. The percent sequence identity among these sequences can be as low as 47%, or even lower sequence identity.

[0601] Candidate paralogous sequences were identified among Arabidopsis transcription factors through alignment, identity, and phylogenic relationships. Candidate orthologous sequences were identified from proprietary unigene sets of plant gene sequences in Zea mays, Glycine max and Oryza sativa based on significant homology to Arabidopsis transcription factors. These candidates were reciprocally compared to the set of Arabidopsis transcription factors. If the candidate showed maximal similarity in the protein domain to the eliciting transcription factor or to a paralog of the eliciting transcription factor, then it was considered to be an ortholog. Identified non-Arabidopsis sequences that were shown in this manner to be orthologous to the Arabidopsis sequences are provided in Table 6.

### Example XI

### Screen of Plant cDNA Library for Sequence Encoding a Transcription Factor DNA Binding Domain That Binds To a Transcription Factor Binding Promoter Element and Demonstration of Protein Transcription Regulation Activity

[0602] The “one-hybrid” strategy (Li and Herskowitz (1993) Science 262: 1870-1874) is used to screen for plant cDNA clones encoding a polypeptide comprising a transcription factor DNA binding domain, a conserved domain. In brief, yeast strains are constructed that contain a lacZ reporter gene with either wild-type or mutant transcription factor binding promoter element sequences in place of the normal UAS (upstream activator sequence) of the GALL promoter. Yeast reporter strains are constructed that carry transcription factor binding promoter element sequences as UAS elements are operably linked upstream (5′) of a lacZ reporter gene with a minimal GAL1 promoter. The strains are transformed with a plant expression library that contains random cDNA inserts fused to the GAL4 activation domain (GAL4-ACT) and screened for blue colony formation on X-gal-treated filters (X-gal: 5-bromo-4-chloro-3-indolyl-β-D-galactoside; Invitrogen Corporation, Carlsbad Calif.). Alternatively, the strains are transformed with a cDNA polynucleotide encoding a known transcription factor DNA binding domain polypeptide sequence.

[0603] Yeast strains carrying these reporter constructs produce low levels of beta-galactosidase and form white colonies on filters containing X-gal. The reporter strains carrying wild-type transcription factor binding promoter element sequences are transformed with a polynucleotide that encodes a polypeptide comprising a plant transcription factor DNA binding domain operably linked to the acidic activator domain of the yeast GAL4 transcription factor, “GAL4-ACT”. The clones that contain a polynucleotide encoding a transcription factor DNA binding domain operably linked to GLA4-ACT can bind upstream of the lacZ reporter genes carrying the wild-type transcription factor binding promoter element sequence, activate transcription of the lacZ gene and result in yeast forming blue colonies on X-gal-treated filters.

[0604] Upon screening about 2×10⁶ yeast transformants, positive cDNA clones are isolated; i.e., clones that cause yeast strains carrying lacZ reporters operably linked to wild-type transcription factor binding promoter elements to form blue colonies on X-gal-treated filters. The cDNA clones do not cause a yeast strain carrying a mutant type transcription factor binding promoter elements fused to LacZ to turn blue. Thus, a polynucleotide encoding transcription factor DNA binding domain, a conserved domain, is shown to activate transcription of a gene.

### Example XII

### Gel Shift Assays

[0605] The presence of a transcription factor comprising a DNA binding domain which binds to a DNA transcription factor binding element is evaluated using the following gel shift assay. The transcription factor is recombinantly expressed and isolated from E. coli or isolated from plant material. Total soluble protein, including transcription factor, (40 ng) is incubated at room temperature in 10 μl of 1× binding buffer (15 mM HEPES (pH 7.9), 1 mM EDTA, 30 mM KCl, 5% glycerol, 5% bovine serum albumin, 1 mM DTT) plus 50 ng poly(dl-dC):poly(dl-dC) (Pharmacia, Piscataway N.J.) with or without 100 ng competitor DNA. After 10 minutes incubation, probe DNA comprising a DNA transcription factor binding element (1 ng) that has been ³²P-labeled by end-filling (Sambrook et al. (1989) supra) is added and the mixture incubated for an additional 10 minutes. Samples are loaded onto polyacrylamide gels (4% w/v) and fractionated by electrophoresis at 150V for 2 h (Sambrook et al. supra). The degree of transcription factor-probe DNA binding is visualized using autoradiography. Probes and competitor DNAs are prepared from oligonucleotide inserts ligated into the BamHI site of pUC118 (Vieira et al. (1987) Methods Enzymol. 153: 3-11). Orientation and concatenation number of the inserts are determined by dideoxy DNA sequence analysis (Sambrook et al. supra). Inserts are recovered after restriction digestion with EcoRI and HindIII and fractionation on polyacrylamide gels (12% w/v) (Sambrook et al. supra).

### Example XIII

### Introduction of Polynucleotides into Dicotyledonous Plants

[0606] Any of the sequences of the invention may be recombined into an expression vector for the purpose of transforming plants for the purpose of modifying plant traits, including increasing the tolerance of plants to abiotic stress, also including drought stress.

[0607] The transcription factor sequences used to generate transgenic plants may include, for example, any of the polynucleotide sequences found in the sequence listing, which incorporates SEQ ID NO: 2N-1, where N=1-210. Also included in the invention are related sequences that confer abiotic stress tolerance and are homologous with respect to SEQ ID NO: 2N-1, where N=1-210 by virtue of being substantially identical to those sequences, or that hybridizes to the complement of any of SEQ ID NO: 2N-1, where N=1-2 10 under stringent conditions (for example, conditions that include two wash steps of 6×SSC and 65° C., each step being 10-30 minutes in duration). All of the sequences of the invention encode polypeptides that have the property of regulating abiotic stress tolerance in a plant when the polypeptides are overexpressed. For example, the paralogs and orthologs of G2133, which include SEQ ID NO: 1, 11, 87, 89, 91, 93, 95, 97, 99, or polynucleotide sequences encoding SEQ ID NO: 2, 12, 88, 90, 92, 94, 96, 98, 100, paralogous, and orthologous sequences, and nucleotide sequences that hybridize over their full length to the complement of these polynucleotide sequences under stringent conditions. are specifically included in the invention. Examples of an expression vectors that may be used includes, for example, pMEN20 or pMEN65. The expression vector is then transformed into a plant, often by using the technique of transforming a plant cell. If a plant cell is the subject of the transformation procedure, it is then regenerated into a plant and allowed to overexpress the polypeptide encoded by aforementioned nucleic acid sequences.

[0608] The cloning vector may also be introduced into a variety of cereal plants by means well known in the art such as, for example, direct DNA transfer or ]Agrobacterium tumefaciens-mediated transformation or other methods (see below). It is now routine to produce transgenic plants using most dicot plants (see Weissbach and Weissbach, (1989) supra; Gelvin et al. (1990) supra; Herrera-Estrella et al. (1983) supra; Bevan (1984) supra; and Klee (1985) supra).

[0609] After abiotic-stress tolerant plants are produced, the transgenic plants may be crossed with another plant or selfed or to produce seed; which may be used to generate progeny plants having increased tolerance to abiotic stress. Generally, the progeny plants will express mRNA that encodes a DNA-binding protein having a conserved domain (e.g., an AP2 domain) that binds to a DNA molecule, regulates its expression, and induces the expression of genes and polypeptides that confer to the plant the desirable trait (e.g., abiotic stress tolerance). In these progeny plants, the mRNA may be expressed at a level greater than in a non-transformed plant that does not overexpress the DNA-binding protein.

[0610] Methods for analysis of traits are routine in the art and examples are disclosed above. Analysis includes identification and selection of plants that exhibit improved abiotic stress tolerance. The goal of the identification and selection steps is to find plants that show improved tolerance to, for example, drought, chilling, heat, germination in cold conditions, or low nutrient (e.g., nitrogen) conditions.

### Example XIV

### Transformation of Cereal Plants With an Expression Vector

[0611] Cereal plants such as, but not limited to, corn, wheat, rice, sorghum, or barley, may also be transformed with the present polynucleotide sequences in pMEN20 or pMEN65 expression vectors for the purpose of modifying plant traits. For example, pMEN020 may be modified to replace the NptII coding region with the BAR gene of Streptomyces hygroscopicus that confers resistance to phosphinothricin. The KpnI and BglII sites of the Bar gene are removed by site-directed mutagenesis with silent codon changes.

[0612] The cloning vector may be introduced into a variety of cereal plants by means well known in the art such as, for example, direct DNA transfer or Agrobacterium tumefaciens-mediated transformation. It is now routine to produce transgenic plants of most cereal crops (Vasil (1994) Plant Mol. Biol. 25: 925-937) such as corn, wheat, rice, sorghum (Cassas et al. (1993) Proc. Natl. Acad. Sci. 90: 11212-11216, and barley (Wan and Lemeaux (1994) Plant Physiol. 104:37-48. DNA transfer methods such as the microprojectile can be used for corn (Fromm et al. (1990) Bio/Technol. 8: 833-839); Gordon-Kamm et al. (1990) Plant Cell 2: 603-618; Ishida (1990) Nature Biotechnol. 14:745-750), wheat (Vasil et al. (1992) Bio/Technol. 10:667-674; Vasil et al. (1993) Bio/Technol. 11:1553-1558; Weeks et al. (1993) Plant Physiol. 102:1077-1084), rice (Christou (1991) Bio/Technol. 9:957-962; Hiei et al. (1994) Plant J. 6:271-282; Aldemita and Hodges (1996) Planta 199:612-617; and Hiei et al. (1997) Plant Mol. Biol. 35:205-218). For most cereal plants, embryogenic cells derived from immature scutellum tissues are the preferred cellular targets for transformation (Hiei et al. (1997) Plant Mol. Biol. 35:205-218; Vasil (1994) Plant Mol. Biol. 25: 925-937).

[0613] Vectors according to the present invention may be transformed into corn embryogenic cells derived from immature scutellar tissue by using microprojectile bombardment, with the A188XB73 genotype as the preferred genotype (Fromm et al. (1990) Bio/Technol. 8: 833-839; Gordon-Kamm et al. (1990) Plant Cell 2: 603-618). After microprojectile bombardment the tissues are selected on phosphinothricin to identify the transgenic embryogenic cells (Gordon-Kamm et al. (1990) Plant Cell 2: 603-618). Transgenic plants are regenerated by standard corn regeneration techniques (Fromm et al. (1990) Bio/Technol. 8: 833-839; Gordon-Kamm et al. (1990) Plant Cell 2: 603-618).

[0614] The plasmids prepared as described above can also be used to produce transgenic wheat and rice plants (Christou (1991) Bio/Technol. 9:957-962; Hiei et al. (1994) Plant J. 6:271-282; Aldemita and Hodges (1996) Planta 199:612-617; and Hiei et al. (1997) Plant Mol. Biol. 35:205-218) that coordinately express genes of interest by following standard transformation protocols known to those skilled in the art for rice and wheat (Vasil et al. (1992) Bio/Technol. 10:667-674; Vasil et al. (1993) Bio/Technol. 11: 1553-1558; and Weeks et al. (1993) Plant Physiol. 102:1077-1084), where the bar gene is used as the selectable marker.

### Example XV

### Transformation of Tomato and Soy Plants

[0615] Numerous protocols for the transformation of tomato and soy plants have been previously described, and are well known in the art. Gruber et al. ((1993) in Methods in Plant Molecular Biology and Biotechnology, p. 89-119, Glick and Thompson, eds., CRC Press, Inc., Boca Raton) describe several expression vectors and culture methods that may be used for cell or tissue transformation and subsequent regeneration. For soybean transformation, methods are described by Miki et al. (1993) in Methods in Plant Molecular Biology and Biotechnology, p. 67-88, Glick and Thompson, eds., CRC Press, Inc., Boca Raton; and U.S. Pat. No. 5,563,055, (Townsend and Thomas), issued Oct. 8, 1996.

[0616] There are a substantial number of alternatives to Agrobacterium-mediated transformation protocols, other methods for the purpose of transferring exogenous genes into soybeans or tomatoes. One such method is microprojectile-mediated transformation, in which DNA on the surface of microprojectile particles is driven into plant tissues with a biolistic device (see, for example, Sanford et al., (1987) Part. Sci. Technol. 5:27-37; Christou et al. (1992) Plant. J. 2: 275-281; Sanford (1993) Methods Enzymol. 217: 483-509; Klein et al. (1987) Nature 327: 70-73; U.S. Pat. No.5,015,580 (Christou et al), issued May 14, 1991; and U.S. Pat. No. 5,322,783 (Tomes et al.), issued Jun. 21, 1994.

[0617] Alternatively, sonication methods (see, for example, Zhang et al. (1991) Bio/Technology 9: 996-997); direct uptake of DNA into protoplasts using CaCl2 precipitation, polyvinyl alcohol or poly-L-ornithine (see, for example, Hain et al. (1985) Mol. Gen. Genet. 199: 161-168; Draper et al., Plant Cell Physiol. 23: 451-458 (1982)); liposome or spheroplast fusion (see, for example, Deshayes et al. (1985) EMBO J., 4: 2731-2737; Christou et al. (1987) Proc. Natl. Acad. Sci. U.S.A. 84: 3962-3966); and electroporation of protoplasts and whole cells and tissues (see, for example, Donn et al.(1990) in Abstracts of VIIth International Congress on Plant Cell and Tissue Culture IAPTC, A2-38: 53; D'Halluin et al. (1992) Plant Cell 4: 1495-1505;and Spencer et al. (1994) Plant Mol. Biol. 24: 51-61) have been used to introduce foreign DNA and expression vectors into plants.

[0618] After plants or plant cells are transformed (and the latter regenerated into plants) the transgenic plant thus generated may be crossed with itself or a plant from the same line, a non-transformed or wild-type plant, or another transformed plant from a different transgenic line of plants. Crossing provides the advantages of being able to produce new and perhaps stable transgenic varieties. Genes and the traits they confer that have been introduced into a tomato or soybean line may be moved into distinct line of plants using traditional backcrossing techniques well known in the art. Transformation of tomato plants may be conducted using the protocols of Koornneef et al (1986) In Tomato Biotechnology: Alan R. Liss, Inc., 169-178,and in U.S. Pat. No. 6,613,962, the latter method described in brief here. Eight day old cotyledon explants are precultured for 24 hours in Petri dishes containing a feeder layer of Petunia hybrida suspension cells plated on MS medium with 2% (w/v) sucrose and 0.8% agar supplemented with 10 liM a-naphthalene acetic acid and 4.4 μM 6-benzylaminopurine. The explants are then infected with a diluted overnight culture of Agrobacterium tumefaciens containing an expression vector comprising a polynucleotide of the invention for 5-10 minutes, blotted dry on sterile filter paper and cocultured for 48 hours on the original feeder layer plates. Culture conditions are as described above. Overnight cultures of Agrobacterium tumefaciens are diluted in liquid MS medium with 2% (w/v/) sucrose, pH 5.7) to an OD₆₀₀ of 0.8.

[0619] Following the cocultivation, the cotyledon explants are transferred to Petri dishes with selective medium consisting of MS medium supplemented with 4.56 μM zeatin, 67.3 μM vancomycin, 418.9 μM cefotaxime and 171.6 μM kanamycin sulfate, and cultured under the culture conditions described above. The explants are subcultured every three weeks onto fresh medium. Emerging shoots are dissected from the underlying callus and transferred to glass jars with selective medium without zeatin to form roots. The formation of roots in a medium containing kanamycin sulfate is regarded as a positive indication of a successful transformation.

[0620] Transformation of soybean plants may be conducted using the methods found in, for example, U.S. Pat. No. 5,563,055 (Townsend et al., issued Oct. 8, 1996), described in brief here. In this method soybean seed is surface sterilized by exposure to chlorine gas evolved in a glass bell jar. Seeds are germinated by plating on 1/10 strength agar solidified medium without plant growth regulators and culturing at 28° C. with a 16 hour day length. After three or four days, seed may be prepared for cocultivation. The seedcoat is removed and the elongating radicle removed 3-4 mm below the cotyledons.

[0621] Overnight cultures of Agrobacterium tumefaciens harboring the expression vector comprising a polynucleotide of the invention are grown to log phase, pooled, and concentrated by centrifugation. Inoculations are conducted in batches such that each plate of seed was treated with a newly resuspended pellet of Agrobacterium. The pellets are resuspended in 20 ml inoculation medium. The inoculum is poured into a Petri dish containing prepared seed and the cotyledonary nodes are macerated with a surgical blade. After 30 minutes the explants are transferred to plates of the same medium which has been solidified. Explants are embedded with the adaxial side up and level with the surface of the medium and cultured at 22° C. for three days under white fluorescent light. These plants may then be regenerated according to methods well established in the art, such as by moving the explants after three days to a liquid counter-selection medium (see U.S. Pat. No. 5,563,055).

[0622] The explants may then be picked, embedded and cultured in solidified selection medium. After one month on selective media transformed tissue becomes visible as green sectors of regenerating tissue against a background of bleached, less healthy tissue. Explants with green sectors are transferred to an elongation medium. Culture is continued on this medium with transfers to fresh plates every two weeks. When shoots are 0.5 cm in length they may be excised at the base and placed in a rooting medium.

### Example XVI

### Genes that Confer Significant Improvements to Non-Arabidopsis Species

[0623] The function of specific orthologs of the sequences in the Sequence Listing may be analyzed through their ectopic overexpression in plants, using the CaMV 35S or other appropriate promoter, identified above. These genes include polynucleotide sequences found in the Sequence Listing such as those found in Arabidopsis thaliana SEQ ID NO: 2 (G47) and SEQ ID NO: 12 (G2133); Oryza sativa (japonica cultivar-group) SEQ ID NO: 98 (G3649), SEQ ID NO: 100 (G3651), and SEQ ID NO: 90 (G3644); Glycine max SEQ ID NO: 88 (G3643); Zinnia elegans SEQ ID NO: 96 (G3647); Brassica rapa subsp. Pekinensis SEQ ID NO: 92 (G3645); and Brassica oleracea SEQ ID NO: 94 (G3646). The polynucleotide and polypeptide sequences derived from monocots may be used to transform both monocot and dicot plants, and those derived from dicots may be used to transform either group, although some of these sequences will function best if the gene is transformed into a plant from the same group as that from which the sequence is derived.

[0624] Seeds of these transgenic plants are subjected to germination assays to measure sucrose sensing. Sterile monocot seeds, including, but not limited to, corn, rice, wheat, rye and sorghum, as well as dicots including, but not limited to soybean and alfalfa, are sown on 80% MS medium plus vitamins with 9.4% sucrose; control media lack sucrose. All assay plates are then incubated at 22° C. under 24-hour light, 120-130 μEin/m²/s, in a growth chamber. Evaluation of germination and seedling vigor is then conducted three days after planting. Overexpressors of these genes may be found to be more tolerant to high sucrose by having better germination, longer radicles, and more cotyledon expansion. These results would indicate that overexpressors of the orthologs in the Sequence Listing are involved in sucrose-specific sugar sensing.

[0625] Plants overexpressing these orthologs may also be subjected to soil-based drought assays to identify those lines that are more tolerant to water deprivation than wild-type control plants. Generally, ortholog overexpressing plants will appear significantly larger and greener, with less wilting or desiccation, than wild-type controls plants, particularly after a period of water deprivation is followed by rewatering and a subsequent incubation period.

### Example XVII

### Identification of Orthologous and Paralogous Sequences

[0626] Orthologs to Arabidopsis genes may identified by several methods, including hybridization, amplification, or bioinformatically. This example describes how one may identify homologs to the Arabidopsis AP2 family transcription factor CBF1 (polynucleotide SEQ ID NO: 421, encoded polypeptide SEQ ID NO: 422), which confers tolerance to abiotic stresses (Thomashow et al. (2002) U.S. Pat. No. 6,417,428), and an example to confirm the function of homologous sequences. In this example, orthologs to CBF1 were found in canola (Brassica napus) using polymerase chain reaction (PCR).

[0627] Degenerate primers were designed for regions of AP2 binding domain and outside of the AP2 (carboxyl terminal domain):

Mol 368 (reverse)

(SEQ ID NO:429)

5′-CAY CCN ATH TAY MGN GGN GT -3′
Mol 378 (forward)

(SEQ ID NO:430)

5′-GGN ARN ARC ATN CCY TCN GCC -3′
(Y: C/T, N: A/C/G/T, H: A/C/T, M: A/C, R: A/G)

[0628] Primer Mol 368 is in the AP2 binding domain of CBF1 (amino acid sequence: His-Pro-Ile-Tyr-Arg-Gly-Val) while primer Mol 378 is outside the AP2 domain (carboxyl terminal domain) (amino acid sequence: Met-Ala-Glu-Gly-Met-Leu-Leu-Pro).

[0629] The genomic DNA isolated from B. napus was PCR-amplified by using these primers following these conditions: an initial denaturation step of 2 min at 93° C.; 35 cycles of 93° C. for 1 min, 55° C. for 1 min, and 72° C. for 1 min ; and a final incubation of 7 min at 72° C. at the end of

[0630] The PCR products were separated by electrophoresis on a 1.2% agarose gel and transferred to nylon membrane and hybridized with the AT CBF1 probe prepared from Arabidopsis genomic DNA by PCR amplification. The hybridized products were visualized by colorimetric detection system (Boehringer Mannheim) and the corresponding bands from a similar agarose gel were isolated using the Qiagen Extraction Kit (Qiagen). The DNA fragments were ligated into the TA clone vector from TOPO TA Cloning Kit (Invitrogen) and transformed into E. coli strain TOP 10 (Invitrogen).

[0631] Seven colonies were picked and the inserts were sequenced on an ABI 377 machine from both strands of sense and antisense after plasmid DNA isolation. The DNA sequence was edited by sequencer and aligned with the AtCBF1 by GCG software and NCBI blast searching.

[0632] The nucleic acid sequence and amino acid sequence of one canola ortholog found in this manner (bnCBF1; polynucleotide SEQ ID NO: 427 and polypeptide SEQ ID NO: 428) identified by this process is shown in the Sequence Listing.

[0633] The aligned amino acid sequences show that the bnCBF1 gene has 88% identity with the Arabidopsis sequence in the AP2 domain region and 85% identity with the Arabidopsis sequence outside the AP2 domain when aligned for two insertion sequences that are outside the AP2 domain.

[0634] Similarly, paralogous sequences to Arabidopsis genes, such as CBF1, may also be identified.

[0635] Two paralogs of CBF1 from Arabidopsis thaliana: CBF2 and CBF3. CBF2 and CBF3 have been cloned and sequenced as described below. The sequences of the DNA SEQ ID NO: 421, 423 and 425 and encoded proteins SEQ ID NO: 422, 424 and 426 are set forth in the Sequence Listing.

[0636] A lambda cDNA library prepared from RNA isolated from Arabidopsis thaliana ecotype Columbia (Lin and Thomashow (1992) Plant Physiol. 99: 519-525) was screened for recombinant clones that carried inserts related to the CBF1 gene (Stockinger et al. (1997) Proc. Natl. Acad. Sci. 94:1035-1040). CBF1 was ³²P-radiolabeled by random priming (Sambrook et al. supra) and used to screen the library by the plaque-lift technique using standard stringent hybridization and wash conditions (Hajela et al. (1990) Plant Physiol. 93:1246-1252; Sambrook et al. supra) 6×SSPE buffer, 60° C. for hybridization and 0.1×SSPE buffer and 60° C. for washes). Twelve positively hybridizing clones were obtained and the DNA sequences of the cDNA inserts were determined. The results indicated that the clones fell into three classes. One class carried inserts corresponding to CBF1. The two other classes carried sequences corresponding to two different homologs of CBF1, designated CBF2 and CBF3. The nucleic acid sequences and predicted protein coding sequences for Arabidopsis CBF1, CBF2 and CBF3 are listed in the Sequence Listing (SEQ ID NOs:421, 423, 425 and SEQ ID NOs: 422, 424, and 426, respectively). The nucleic acid sequences and predicted protein coding sequence for Brassica napus CBF ortholog is listed in the Sequence Listing (SEQ ID NOs: 427 and 428, respectively).

[0637] A comparison of the nucleic acid sequences of Arabidopsis CBF1, CBF2 and CBF3 indicate that they are 83 to 85% identical as shown in Table 11.

TABLE 11

Percent identity^{a}

| | DNA^{b} | Polypeptide |
|---|---|---|
| cbf1/cbf2 | 85 | 86 |
| cbf1/cbf3 | 83 | 84 |
| cbf2/cbf3 | 84 | 85 |

^{a}Percent identity was determined using the Clustal algorithm from the Megalign program (DNASTAR, Inc.).
^{b}Comparisons of the nucleic acid sequences of the open reading frames are shown.

[0638] Similarly, the amino acid sequences of the three CBF polypeptides range from 84 to 86% identity. An alignment of the three amino acidic sequences reveals that most of the differences in amino acid sequence occur in the acidic C-terminal half of the polypeptide. This region of CBF1 serves as an activation domain in both yeast and Arabidopsis (not shown).

[0639] Residues 47 to 106 of CBF1 correspond to the AP2 domain of the protein, a DNA binding motif that to date, has only been found in plant proteins. A comparison of the AP2 domains of CBF1, CBF2 and CBF3 indicates that there are a few differences in amino acid sequence. These differences in amino acid sequence might have an effect on DNA binding specificity.

### Example XVIII

### Transformation of Canola With a Plasmid Containing CBF1, CBF2, or CBF3

[0640] After identifying homologous genes to CBF1, canola was transformed with a plasmid containing the Arabidopsis CBF1, CBF2, or CBF3 genes cloned into the vector pGA643 (An (1987) Methods Enzymol. 253: 292). In these constructs the CBF genes were expressed constitutively under the CaMV 35S promoter. In addition, the CBF1 gene was cloned under the control of the Arabidopsis COR15 promoter in the same vector pGA643. Each construct was transformed into Agrobacterium strain GV3101. Transformed Agrobacteria were grown for 2 days in minimal AB medium containing appropriate antibiotics.

[0641] Spring canola (B. napus cv. Westar) was transformed using the protocol of Moloney et al. ((1989) Plant Cell Reports 8: 238) with some modifications as described. Briefly, seeds were sterilized and plated on half strength MS medium, containing 1% sucrose. Plates were incubated at 24° C. under 60-80 μE/m²s light using a 16 hour light/8 hour dark photoperiod. Cotyledons from 4-5 day old seedlings were collected, the petioles cut and dipped into the Agrobacterium solution. The dipped cotyledons were placed on co-cultivation medium at a density of 20 cotyledons/plate and incubated as described above for 3 days. Explants were transferred to the same media, but containing 300 mg/l timentin (SmithKline Beecham, Pa.) and thinned to 10 cotyledons/plate. After 7 days explants were transferred to Selection/Regeneration medium. Transfers were continued every 2-3 weeks (2 or 3 times) until shoots had developed. Shoots were transferred to Shoot-Elongation medium every 2-3 weeks. Healthy looking shoots were transferred to rooting medium. Once good roots had developed, the plants were placed into moist potting soil.

[0642] The transformed plants were then analyzed for the presence of the NPTII gene/kanamycin resistance by ELISA, using the ELISA NPTII kit from 5Prime-3Prime Inc. (Boulder, Colo.). Approximately 70% of the screened plants were NPTII positive. Only those plants were further analyzed.

[0643] From Northern blot analysis of the plants that were transformed with the constitutively expressing constructs, showed expression of the CBF genes and all CBF genes were capable of inducing the Brassica napus cold-regulated gene BN115 (homolog of the Arabidopsis COR15 gene). Most of the transgenic plants appear to exhibit a normal growth phenotype. As expected, the transgenic plants are more freezing tolerant than the wild-type plants. Using the electrolyte leakage of leaves test, the control showed a 50% leakage at −2 to −3° C. Spring canola transformed with either CBF1 or CBF2 showed a 50% leakage at −6 to −7° C. Spring canola transformed with CBF3 shows a 50% leakage at about −10 to −15° C. Winter canola transformed with CBF3 may show a 50% leakage at about −16 to −20° C. Furthermore, if the spring or winter canola are cold acclimated the transformed plants may exhibit a further increase in freezing tolerance of at least −2° C.

[0644] To test salinity tolerance of the transformed plants, plants were watered with 150 mM NaCl. Plants overexpressing CBF1, CBF2 or CBF3 grew better compared with plants that had not been transformed with CBF1, CBF2 or CBF3.

[0645] These results demonstrate that homologs of Arabidopsis transcription factors can be identified and shown to confer similar functions in non-Arabidopsis plant species.

### Example XIX

### Cloning of Transcription Factor Promoters

[0646] Promoters are isolated from transcription factor genes that have gene expression patterns useful for a range of applications, as determined by methods well known in the art (including transcript profile analysis with cDNA or oligonucleotide microarrays, Northern blot analysis, semi-quantitative or quantitative RT-PCR). Interesting gene expression profiles are revealed by determining transcript abundance for a selected transcription factor gene after exposure of plants to a range of different experimental conditions, and in a range of different tissue or organ types, or developmental stages. Experimental conditions to which plants are exposed for this purpose includes cold, heat, drought, osmotic challenge, varied hormone concentrations (ABA, GA, auxin, cytokinin, salicylic acid, brassinosteroid), pathogen and pest challenge. The tissue types and developmental stages include stem, root, flower, rosette leaves, cauline leaves, siliques, germinating seed, and meristematic tissue. The set of expression levels provides a pattern that is determined by the regulatory elements of the gene promoter.

[0647] Transcription factor promoters for the genes disclosed herein are obtained by cloning 1.5 kb to 2.0 kb of genomic sequence immediately upstream of the translation start codon for the coding sequence of the encoded transcription factor protein. This region includes the 5′-UTR of the transcription factor gene, which can comprise regulatory elements. The 1.5 kb to 2.0 kb region is cloned through PCR methods, using primers that include one in the 3′ direction located at the translation start codon (including appropriate adaptor sequence), and one in the 5′ direction located from 1.5 kb to 2.0 kb upstream of the translation start codon (including appropriate adaptor sequence). The desired fragments are PCR-amplified from Arabidopsis Col-0 genomic DNA using high-fidelity Taq DNA polymerase to minimize the incorporation of point mutation(s). The cloning primers incorporate two rare restriction sites, such as Not1 and Sfi1, found at low frequency throughout the Arabidopsis genome. Additional restriction sites are used in the instances where a Not1 or Sfi1 restriction site is present within the promoter.

[0648] The 1.5-2.0 kb fragment upstream from the translation start codon, including the 5′-untranslated region of the transcription factor, is cloned in a binary transformation vector immediately upstream of a suitable reporter gene, or a transactivator gene that is capable of programming expression of a reporter gene in a second gene construct. Reporter genes used include green fluorescent protein (and related fluorescent protein color variants), beta-glucuronidase, and luciferase. Suitable transactivator genes include LexA-GAL4, along with a transactivatable reporter in a second binary plasmid (as disclosed in U.S. patent application Ser. No. 09/958,131, incorporated herein by reference). The binary plasmid(s) is transferred into Agrobacterium and the structure of the plasmid confirmed by PCR. These strains are introduced into Arabidopsis plants as described in other examples, and gene expression patterns determined according to standard methods know to one skilled in the art for monitoring GFP fluorescence, beta-glucuronidase activity, or luminescence.

[0649] All publications and patent applications mentioned in this specification are herein incorporated by reference to the same extent as if each individual publication or patent application was specifically and individually indicated to be incorporated by reference.

[0650] The present invention is not limited by the specific embodiments described herein. The invention now being fully described, it will be apparent to one of ordinary skill in the art that many changes and modifications can be made thereto without departing from the spirit or scope of the appended claims. Modifications that become apparent from the foregoing description and accompanying figures fall within the scope of the claims.

The application's sequence listing, which the Patent Office published only in electronic form, follows.

SEQUENCE LISTING (430 sequences)

SEQ ID NO: 1 - DNA, 785 bp, Arabidopsis thaliana
  G47  reference sequence; clade identifier
cttcttcttcacatcgatcatcatacaacaacaaaaaatggattacagagaatccaccggtgaaagtcagtcaaagtacaaaggaatccgtcgtcggaaatggggcaaatgggtatcagagattagagttccgggaactcgtgaccgtctctggttaggttcattctcaacagcagaaggtgccgccgtagcacacgacgttgctttcttctgtttacaccaacctgattctttagaatctctcaatttccctcatttgcttaatccttcactcgtttccagaacttctccgagatctatccagcaagctgcttctaacgccggcatggccattgacgccggaatcgtccacagtaccagcgtgaactctggatgcggagatacgacgacgtattacgagaatggagctgatcaagtggagccgttgaatatttcagtgtatgattatctgggcggccacgatcacgtttgatttatctcgacggtcatgatcacgtttgatcttcttttgagtaagattttgtaccataatcaaaacaggtgtggtgctaaaatcttactcaaaacaagattaggtaccacagagaaacaatcaaatggttgtgaatatacattataaggttttgattaatgtttgtttcactgatttagtgaagtttggtccattgtatacaaatctattcaagaaacctagcgcgagatcatgtttcgtgattgaagattgagatttttaagtattcgtaatatttttgtaaaatacaaataaaaaaaaaaaaaaaaaaaaa

SEQ ID NO: 2 - protein, 144 aa, Arabidopsis thaliana
  G47 polypeptide reference sequence; clade identifier
MDYRESTGESQSKYKGIRRRKWGKWVSEIRVPGTRDRLWLGSFSTAEGAAVAHDVAFFCLHQPDSLESLNFPHLLNPSLVSRTSPRSIQQAASNAGMAIDAGIVHSTSVNSGCGDTTTYYENGADQVEPLNISVYDYLGGHDHV

SEQ ID NO: 3 - DNA, 1449 bp, Arabidopsis thaliana
  G922 reference sequence; clade identifier
atggtggctatgtttcaagaagataatggaacatcttctgtagcttcatcaccacttcaagtcttctcaactatgtcactcaacagaccgactctcctcgcttcttcatctccgtttcattgtctcaaagatctcaaaccagaggagcgtggtctctacttaatccacctcttgctaacttgtgccaaccacgtggcttcaggtagcctccaaaacgctaacgcagcgctcgagcagctctctcacctcgcttctcctgacggcgacacgatgcagcgaatcgctgcttacttcaccgaagcgcttgctaacagaatccttaagtcctggcctggtctttacaaggctcttaacgcaactcagacaagaactaacaatgtctctgaggagattcatgttagaagactcttctttgagatgttcccgatactcaaagtctcttacttgctcactaatcgagctatactcgaggctatggaaggagagaagatggttcatgtgattgatctcgatgcttctgagccagctcaatggcttgctttgcttcaagcttttaactctaggcctgaaggtccacctcatttgagaatcactggtgttcatcaccagaaggaagtgcttgaacaaatggctcatagactcattgaggaagcagagaaactcgatatcccgtttcagtttaatcccgttgtgagtaggttagactgtttaaatgtagaacagttgcgggttaaaacaggagaggccttagccgttagctcggttcttcaattgcataccttcttggcctctgatgatgatctcatgagaaagaactgcgctttacggtttcagaacaaccctagtggagttgacttgcagagagttctaatgatgagccatggctctgcagctgaggcacgtgagaatgatatgagtaacaacaatgggtatagccctagcggtgactcggcctcatctttgcctttaccaagttcaggaaggactgatagcttcctcaatgctatttggggtttgtctccaaaggtcatggtggtcactgagcaagactcagaccacaacggctccacactaatggagaggctattagaatcactttacacctacgcagcattgtttgattgcttggaaacaaaagttccaagaacgtctcaagataggatcaaagtggagaagatgctcttcggggaggagatcaagaacatcatatcctgcgagggatttgagagaagagaaagacacgagaagcttgagaaatggagccagaggatcgatttggctggttttgggaatgttcctcttagctattatgcgatgttgcaggctaggagattgcttcaagggtgcggttttgatgggtatagaatcaaggaagagagcgggtgcgcagtaatttgctggcaagatcgacctctatactcggtatcagcttggagatgcaggaagtga

SEQ ID NO: 4 - protein, 482 aa, Arabidopsis thaliana
  G922 polypeptide reference sequence; clade identifier
MVAMFQEDNGTSSVASSPLQVFSTMSLNRPTLLASSSPFHCLKDLKPEERGLYLIHLLLTCANHVASGSLQNANAALEQLSHLASPDGDTMQRIAAYFTEALANRILKSWPGLYKALNATQTRTNNVSEEIHVRRLFFEMFPILKVSYLLTNRAILEAMEGEKMVHVIDLDASEPAQWLALLQAFNSRPEGPPHLRITGVHHQKEVLEQMAHRLIEEAEKLDIPFQFNPVVSRLDCLNVEQLRVKTGEALAVSSVLQLHTFLASDDDLMRKNCALRFQNNPSGVDLQRVLMMSHGSAAEARENDMSNNNGYSPSGDSASSLPLPSSGRTDSFLNAIWGLSPKVMVVTEQDSDHNGSTLMERLLESLYTYAALFDCLETKVPRTSQDRIKVEKMLFGEEIKNIISCEGFERRERHEKLEKWSQRIDLAGFGNVPLSYYAMLQARRLLQGCGFDGYRIKEESGCAVICWQDRPLYSVSAWRCRK

SEQ ID NO: 5 - DNA, 585 bp, Arabidopsis thaliana
  G1274  reference sequence; clade identifier
atgaatatctctcaaaaccctagccctaattttacgtacttctccgatgaaaactttattaatccgtttatggataacaacgatttctcaaatttgatgttctttgacatagatgaaggaggtaacaatggattaatcgaggaagagatctcatctccgacaagcatcgtttcgtcggagacatttaccggggaaagcggcggatccggcagcgcaacaacgttgagtaaaaaggaatcaactaatagaggaagtaaagagagtgatcagacgaaggagacgggtcatcgagttgcatttagaacgagatcgaagattgatgtgatggatgatggttttaaatggaggaagtatggcaagaaatctgtcaaaaacaacattaacaagaggaattactacaaatgctcaagtgaaggttgctcggtgaagaagagggtagagagagatggtgacgatgcagcttatgtaattacaacatatgaaggagtccataaccatgagagtctctctaatgtctattacaatgaaatggttttatcttatgatcatgataactggaaccaacactctcttcttcgatcttaa

SEQ ID NO: 6 - protein, 194 aa, Arabidopsis thaliana
  G1274 polypeptide reference sequence; clade identifier
MNISQNPSPNFTYFSDENFINPFMDNNDFSNLMFFDIDEGGNNGLIEEEISSPTSIVSSETFTGESGGSGSATTLSKKESTNRGSKESDQTKETGHRVAFRTRSKIDVMDDGFKWRKYGKKSVKNNINKRNYYKCSSEGCSVKKRVERDGDDAAYVITTYEGVHNHESLSNVYYNEMVLSYDHDNWNQHSLLRS

SEQ ID NO: 7 - DNA, 696 bp, Arabidopsis thaliana
  G1792 reference sequence; clade identifier
aatccatagatctcttattaaataacagtgctgaccaagctcttacaaagcaaaccaatctagaacaccaaagttaatggagagctcaaacaggagcagcaacaaccaatcacaagatgacaagcaagctcgtttccggggagttcgaagaaggccttggggaaagtttgcagcagagattcgagacccgtcgagaaacggtgcccgtctttggctcgggacatttgagaccgctgaggaggcagcaagggcttatgaccgagcagcctttaaccttaggggtcatctcgctatactcaacttccctaatgagtattatccacgtatggacgactactcgcttcgccctccttatgcttcttcttcttcgtcgtcgtcatcgggttcaacttctactaatgtgagtcgacaaaaccaaagagaagttttcgagtttgagtatttggacgataaggttcttgaagaacttcttgattcagaagaaaggaagagataatcacgattagttttgttttgatattttatgtggcactgttgtggctacctacgtgcattatgtgcatgtataggtcgcttgattagtactttataacatgcatgccacgaccataaattgtaagagaagacgtactttgcgttttcatgaaatatgaatgttagatggtttgagtacaaaaaaaaaaaaaaaaaaaaaaa

SEQ ID NO: 8 - protein, 139 aa, Arabidopsis thaliana
  G1792 polypeptide reference sequence; clade identifier
MESSNRSSNNQSQDDKQARFRGVRRRPWGKFAAEIRDPSRNGARLWLGTFETAEEAARAYDRAAFNLRGHLAILNFPNEYYPRMDDYSLRPPYASSSSSSSSGSTSTNVSRQNQREVFEFEYLDDKVLEELLDSEERKR

SEQ ID NO: 9 - DNA, 1029 bp, Arabidopsis thaliana
  G2053  reference sequence; clade identifier
atggagaatccggtgggtttaagattccgtccgaccgacaaggagatcgtcgtcgattacctccgaccaaaaaactccgatagggacacgagtcatgttgatcgagtcattagcacagtcactatccgtagcttcgacccttgggagttaccttgccagtctaggatcaaactgaaagatgagtcttggtgtttcttcagccctaaggagaacaaatatggcagaggtgatcaacaaattagaaaaacgaaatctggttactggaagattactggcaaaccaaagcctatcttgcgtaaccgccaagagatcggtgagaaaaaggttttgatgttttacatgagtaaggaacttggtggatccaaatccgactgggttatgcacgagtaccatgctttctctcctactcagatgatgatgacatatacaatatgtaaagttatgtttaagggtgacgtgagagagatttcttcttcttctgcttcttatggtagtgaaattgagcagagtcgtgactctttaatccctcttcttgtgaacgattctgaggaagaagctcaaatcgaggatgctataccaatagaggaatgggaaacatggttgactgatgatggtgttgatgagcaggtgaatcatattatgaatatgaaagatgatcgcaacaaccacaggcctcaaaagccattgactggtgtcttgattgacgatagtagtgatgatgatgatgattctgatttgctatctccaacaacaaattctattgaaaattcgagcacttgtgatagttttggtagctcagaccaaatcaacttagtgtcactaactcaagaggtgagccaagctctgataaccagtattgatacacccgagaagattaagagtccttatgatgatgcacaagggactggggctggagggcaaaaattgggtcaagagactcgagagaagaaacgagctggtttctttcacaggatgatacaaatattcgtcaagaaaattcaccaatgttcttctatctcaagaacataa

SEQ ID NO: 10 - protein, 342 aa, Arabidopsis thaliana
  G2053 polypeptide reference sequence; clade identifier
MENPVGLRFRPTDKEIVVDYLRPKNSDRDTSHVDRVISTVTIRSFDPWELPCQSRIKLKDESWCFFSPKENKYGRGDQQIRKTKSGYWKITGKPKPILRNRQEIGEKKVLMFYMSKELGGSKSDWVMHEYHAFSPTQMMMTYTICKVMFKGDVREISSSSASYGSEIEQSRDSLIPLLVNDSEEEAQIEDAIPIEEWETWLTDDGVDEQVNHIMNMKDDRNNHRPQKPLTGVLIDDSSDDDDDSDLLSPTTNSIENSSTCDSFGSSDQINLVSLTQEVSQALITSIDTPEKIKSPYDDAQGTGAGGQKLGQETREKKRAGFFHRMIQIFVKKIHQCSSISRT

SEQ ID NO: 11 - DNA, 485 bp, Arabidopsis thaliana
  G2133 Predicted polypeptide sequence is paralogous to G47
atctcatcttcatccacccaaaaacatggattcaagagacaccggagaaactgaccagagcaagtacaaaggtatccgtcgtcggaaatggggaaaatgggtatcagagattcgtgtcccgggaactcgtcaacgtctctggttaggctctttctccaccgcagaaggcgctgccgtagcccacgacgtcgctttttactgcttgcaccgaccatcttccctcgacgacgaatcttttaacttccctcacttacttacaacctccctcgcctccaatatatctcctaagtccatccaaaaagctgcttccgacgccggcatggccgtggacgccggattccatggtgctgtgtctgggagtggtggttgtgaagagagatcttccatggcgaatatggaggaggaggacaaacttagtatctccgtgtatgattatcttgaagacgatctcgtttgatctatacgagtacgtttttagcagttaa

SEQ ID NO: 12 - protein, 143 aa, Arabidopsis thaliana
  G2133 polypeptide  Paralogous to G47
MDSRDTGETDQSKYKGIRRRKWGKWVSEIRVPGTRQRLWLGSFSTAEGAAVAHDVAFYCLHRPSSLDDESFNFPHLLTTSLASNISPKSIQKAASDAGMAVDAGFHGAVSGSGGCEERSSMANMEEEDKLSISVYDYLEDDLV

SEQ ID NO: 13 - DNA, 891 bp, Arabidopsis thaliana
  G2999 reference sequence; clade identifier
tattagggttttctttattcagaagcttcaagatcagaaaagatggaagttagagagaagaaagatgagaaaatggagatgacaagaagaaaatcatcagctctagatcatcatcgtcttcctccgtacacttactcccaaaccgccaacaaagagaaacccaccaccaaaagaaacgggtcggacccggatccggatccggatcttgatactaacccaatttctatatctcatgctccaagatcatacgctaggcctcaaactacttctccggggaaggcaaggtatagagaatgccaaaagaatcacgcggcgagctccggtggacacgttgtcgacggttgcggcgagtttatgtcttccggggaagaaggcacggtggagtctcttctttgtgcagcttgtgattgccaccggagcttccatagaaaagagatcgatggtttgtttgttgtcaatttcaatagctttggccattcacagagaccactcggaagccgccacgtgtctccgataatgatgagttttggtggtggtggtggttgtgcggcggagtcatcgacggaggatctaaacaagtttcatcaatcttttagtggttatggagtggatcagtttcatcattatcaacccaagaaacggtttaggacaaagtttaatgaagaacagaaggagaagatgatggagtttgctgagaagattggttggagaatgacaaaactagaagatgatgaagtgaatcggttttgtcgtgagattaaagttaaaagacaagtgtttaaagtttggatgcacaacaataaacaagcagcaaagaagaaggatttgtaagagatttctatatatatatatatactatttttacttctctttgttcaacattgctttaac

SEQ ID NO: 14 - protein, 262 aa, Arabidopsis thaliana
  G2999 polypeptide reference sequence; clade identifier
MEVREKKDEKMEMTRRKSSALDHHRLPPYTYSQTANKEKPTTKRNGSDPDPDPDLDTNPISISHAPRSYARPQTTSPGKARYRECQKNHAASSGGHVVDGCGEFMSSGEEGTVESLLCAACDCHRSFHRKEIDGLFVVNFNSFGHSQRPLGSRHVSPIMMSFGGGGGCAAESSTEDLNKFHQSFSGYGVDQFHHYQPKKRFRTKFNEEQKEKMMEFAEKIGWRMTKLEDDEVNRFCREIKVKRQVFKVWMHNNKQAAKKKDL

SEQ ID NO: 15 - DNA, 1621 bp, Arabidopsis thaliana
  G3086 reference sequence; clade identifier
aagtttctctcacgttctcttttttaattttaatttctcgccggaaacaatctcatctcccggcgaacgaaacttccggtgtggtactgcaaacggagaaaaaaataaccaaagaagagagaaactcaaaagctactaagatggaatcagaattccagcaacatcacttccttctccacgatcatcaacaccagagaccaagaaactcaggattgattcgttaccaatcagcaccaagttcgtacttttcgagtttcggtgaatcaatcgaagagtttttagatcgacccacaagtcctgaaactgagcgaatcttatctggctttttacaaaccaccgacacaagcgacaacgttgatagtttccttcaccatacttttaacagtgatggaactgagaagaaacctccggaagttaaaacagaggacgaagatgctgaaattccggtgactgcgacggcgacggcgatggaggttgttgtttccggtgatggtgaaatctcagtgaatcctgaagtatcgattgggtatgtggcttcggtttcgaggaataagagaccaagagagaaagatgatcggactccggtgaataatctagctcgtcataatagttcaccggccggattattttcatccattgatgttgaaacagcttatgcagctgtaatgaaaagtatgggaggttttggaggaagtaatgtgatgagtacaagcaatactgaagcttcgtctcttactcctagaagcaagttacttcctcctacttctagagcgatgagtccgatctctgaggttgatgttaaacccggtttctcgtctagattgcctcctcggacgctttccggtgggtttaatcgttcttttgggaatgaagggtctgcttcttccaagcttacagctcttgctaggacccaatctggaggtctagatcaatacaaaaccaaggatgaggattcagcaagtagacgtcctcctttggcacatcacatgagtttgcccaagtctttatcagatattgaacagttactgtcagattctatcccatgtaagatcagagccaagcggggttgtgcaactcatcctcgaagcatagccgagagggtgagaagaaccaagatcagtgaaagaatgaggaagctgcaagaccttgttccaaacatggacacgcaaacaaacacagcagacatgttggatcttgcggttcaatacatcaaggacctgcaagaacaagtgaaggcgctcgaagagagtcgggcaagatgtagatgctctagtgcgtgaaactagaagtgggagtatgcgcgagtgctagccagggagggagttgtgcatagaagtatcggttcggcctttggagaaaagtcgaagatagcaaagtagagaagagatcatgaacaaagctaaatttggtggtggtggtgaaaagggtttttgtaaagttggaacctttttttggtagggaagaaagtagcaaggttgtgtaatggtccgaactccaatgctattgtatgttcttacatccaaaaaaaagaaaagcagaagagaagtgatgtacaatgagaagcttattttattgtaactcaagaataattcaggtaattagtttaaaaaaaaaaaaaaaa

SEQ ID NO: 16 - protein, 379 aa, Arabidopsis thaliana
  G3086 polypeptide reference sequence; clade identifier
MESEFQQHHFLLHDHQHQRPRNSGLIRYQSAPSSYFSSFGESIEEFLDRPTSPETERILSGFLQTTDTSDNVDSFLHHTFNSDGTEKKPPEVKTEDEDAEIPVTATATAMEVVVSGDGEISVNPEVSIGYVASVSRNKRPREKDDRTPVNNLARHNSSPAGLFSSIDVETAYAAVMKSMGGFGGSNVMSTSNTEASSLTPRSKLLPPTSRAMSPISEVDVKPGFSSRLPPRTLSGGFNRSFGNEGSASSKLTALARTQSGGLDQYKTKDEDSASRRPPLAHHMSLPKSLSDIEQLLSDSIPCKIRAKRGCATHPRSIAERVRRTKISERMRKLQDLVPNMDTQTNTADMLDLAVQYIKDLQEQVKALEESRARCRCSSA

SEQ ID NO: 17 - DNA, 553 bp, Arabidopsis thaliana
  G30 Predicted polypeptide sequence is paralogous to G1792
ctcttctgacgcacaacagtatatacacatacacagatatatggatcaaggaggtcgtagcagtggtagtggaggaggaggagccgagcaagggaagtaccgtggagtaaggagacgaccttggggtaaatacgccgcggaaataagagattcgaggaagcacggagagcgtgtgtggctagggacattcgacactgcggaagacgcggctcgagcctatgaccgagccgcctattcaatgagaggcaaagctgccattctcaacttccctcacgagtataacatgggaaccggatcctcatccactgcggctaattcttcttcctcgtcgcagcaagtttttgagtttgagtacttggacgatagcgttttggatgaacttcttgaatatggagagaactataacaagactcataatatcaacatgggcaagaggcaataaagggaatacaatcggtattaactgaaagttatgtgaaagaccattttcagttataacaaataaaataaaatcccaagcgtacaaagctgtttctaaaaaaaaaaaaaaaaa

SEQ ID NO: 18 - protein, 133 aa, Arabidopsis thaliana
  G30 polypeptide  Paralogous to G1792
MDQGGRSSGSGGGGAEQGKYRGVRRRPWGKYAAEIRDSRKHGERVWLGTFDTAEDAARAYDRAAYSMRGKAAILNFPHEYNMGTGSSSTAANSSSSSQQVFEFEYLDDSVLDELLEYGENYNKTHNINMGKRQ

SEQ ID NO: 19 - DNA, 1462 bp, Arabidopsis thaliana
  G515 Predicted polypeptide sequence is paralogous to G2053
caaccatggcgaaagctctccaatgcatatttttttgatcttttccttttcccttcttttttgatcgctgcagagaaatggaaactcctgtgggtttaagattctgtccgaccgacgaggagatcgtcgtcgattacctttggccgaaaaattccgatagagacacgagccatgtcgatcgattcattaacacagtccctgtctgtagactcgatccttgggagttaccttgccagtcaaggatcaaactgaaagatgtggcttggtgtttcttcagacctaaggagaacaaatatggcagaggtgatcagcagatgagaaaaacgaaatctgggttttggaagagtactggcagaccaaagcctatcatgcgtaatcgccaacagatcggtgagaaaaagattttgatgttttacacgagtaaggaatccaaatccgattgggttatacacgagtaccacggtttctctcataaccagatgatgatgacatacacactctgtaaagttatgtttaatggtggcatgagagagaagtcttcctcttctccttcttcttctggtgttagtggaattgagcagagtcgtcgtgactctttaatccctcagcttgtcaacaattctgagggatcctcacttcacagagaagatccaagtcagtttggtgatgtgctgcaagaagctccaatcgaggatgctaaactgaccgaggaattggtaaaatggctgatgaatgatgaggatgatgctcaaatcgaggatgctataccgattgaggaatgggaaacatggttgaatgatattgatgatgctaaggagaagagtatcatgtttatgcatgataatcgaagtgattacagacctccaaactcattaactggtgtcttcagtgatgatgttagcagtgatgataatgattctgatttgctaactccaaaaacaaactctattcaaacttcgagcacttgtgatagttttggtagctcaaatcatcgcatagaccagatcaaagacctgcaagaatctcctacctcaacaatcaacttagtgtcactaactcaagaggtgagccaagctctaataaccagtattgataccgccgagaagaagaagaatccttatgatgatgcacaagggactgagattggtgagcataaattgggtcaagagacgatcaagaagaaaagagctggtttctttcacaggatgatacaaaaattcgtcaagaaaattcacctatgttcttccatctcaagaacttgataacaataaaagtgatcaataacaccttttctactttccaaattatttacaacagtacaagtgtatgctatgatgtctatcttggtttgtaactttaccatactgtatgtgtgatatgtataaaactggtaaatttgtgaagacaaatttgtatccattgacataataatgtctatcttgttttgttaaaaaaaaaaaaa

SEQ ID NO: 20 - protein, 394 aa, Arabidopsis thaliana
  G515 polypeptide  Paralogous to G2053
METPVGLRFCPTDEEIVVDYLWPKNSDRDTSHVDRFINTVPVCRLDPWELPCQSRIKLKDVAWCFFRPKENKYGRGDQQMRKTKSGFWKSTGRPKPIMRNRQQIGEKKILMFYTSKESKSDWVIHEYHGFSHNQMMMTYTLCKVMFNGGMREKSSSSPSSSGVSGIEQSRRDSLIPQLVNNSEGSSLHREDPSQFGDVLQEAPIEDAKLTEELVKWLMNDEDDAQIEDAIPIEEWETWLNDIDDAKEKSIMFMHDNRSDYRPPNSLTGVFSDDVSSDDNDSDLLTPKTNSIQTSSTCDSFGSSNHRIDQIKDLQESPTSTINLVSLTQEVSQALITSIDTAEKKKNPYDDAQGTEIGEHKLGQETIKKKRAGFFHRMIQKFVKKIHLCSSISRT

SEQ ID NO: 21 - DNA, 1053 bp, Arabidopsis thaliana
  G516 Predicted polypeptide sequence is paralogous to G2053
atggcgaatccggtgggttttagattccgtccgactgacggggagatcgtcgacatttacctccgaccgaaaaatctcgaaagtaacacgagccatgtcgatgaagtcattagcacagttgatatttgtagcttcgacccttgggacttaccttcccattctaggatgaaaacaagagatcaggtttggtatttcttcggccgtaaggagaacaaatatggtaaaggtgatcgacagataagaaaaaccaagtctggtttttggaagaaaactggcgttaccatggatataatgcgcaaaacgggagatcgtgagaagatcggtgagaaaagggttttggtgtttaagaatcacggtggttccaagtccgattgggctatgcatgagtatcacgctacgttctcgtctcctaatcagggtgaaaggagagaattttcagttgctactggtagtggaattaagcatactcactctttaatccctcctaccaacaattctggagttttgagtgtagagacagagggatcgttgtttcacagccaagaatcacagaatccaagtcagttttctggctttcttgatgtggatgcactagatagggacttctgcaatattttgagtgatgatttcaaaggcttctttaatgatgacgatgagcagagtaagattgtttctatgcaagatgatcgcaacaaccacacacctcaaaagccattgaccggtgtcttcagtgatcatagcaccgatggtagtgattctgatccgatttctgcaacaactatttccattcaaactttaagcacttgtcctagttttggtagctcaaatcctctataccaaatcactgacttgcaggaatctcctaactcaatcaagttagtgtcattagctcaagaggtgagcaaaacaccgggaaccggtattgataatgatgcacaagggactgagattggtgagcataaattgggtcaagagacgatcaagaacaaaagagctggtttctttcacaggatgatacaaaaattcgtcaagaaaattcacctaagaacatga

SEQ ID NO: 22 - protein, 350 aa, Arabidopsis thaliana
  G516 polypeptide  Paralogous to G2053
MANPVGFRFRPTDGEIVDIYLRPKNLESNTSHVDEVISTVDICSFDPWDLPSHSRMKTRDQVWYFFGRKENKYGKGDRQIRKTKSGFWKKTGVTMDIMRKTGDREKIGEKRVLVFKNHGGSKSDWAMHEYHATFSSPNQGERREFSVATGSGIKHTHSLIPPTNNSGVLSVETEGSLFHSQESQNPSQFSGFLDVDALDRDFCNILSDDFKGFFNDDDEQSKIVSMQDDRNNHTPQKPLTGVFSDHSTDGSDSDPISATTISIQTLSTCPSFGSSNPLYQITDLQESPNSIKLVSLAQEVSKTPGTGIDNDAQGTEIGEHKLGQETIKNKRAGFFHRMIQKFVKKIHLRT

SEQ ID NO: 23 - DNA, 1080 bp, Arabidopsis thaliana
  G517 Predicted polypeptide sequence is paralogous to G2053
atgatgaatccggtgggtttcagattccgtccaaacgacgaggagatcgtcgaccattacctccggccaaaaaatctcgatagtgacactagccatgtcgatgaagtcattagcacagtcgatatctgtagcttcgagccttgggatttaccttccaagtcgatgatcaaatcgagagatggggtttggtatttctttagtgttaaggagatgaagtataacagaggtgatcaacagagaagaagaacaaactctgggttttggaagaaaactggaaaaacaatgactgtcatgcgcaaaagaggaaatcgtgagaagatcggtgagaaaagggttttggtttttaagaatcgagatggttcaaagaccgactgggttatgcacgagtatcacgctacgtccttgtttcctaatcagatgatgacgtatacagtctgcaaagttgagtttaagggtgaagagacagagatctcttcttcttctactggtagtgaaattgaacagattcactctttaatccctcttgtgaacagttctggaggatctgagggttcgtcgtttcacagccaagaattacagaattcaagtcagtctggtgtctttgctaatgtgcagggagaatctcaaatcgatgatgcaactacaccgattgaggaggaatggaaaacatggttgaataatgatggtgatgagcagaggaatatcatgtttatgcaagatcatcgcagcgattacacacctctaaagtcgttaactggtgtcttcagtgatgatagcagtgatgataatgattctgatttgatatctcctaaaacaaattctattggaacttcgagcacttgtgctagttttgctagctcaaatcatcagatagaccaaactcaacattctcctgactcaacagtccagctagtgtcattaactcaagaggtgagccaaggtccgggtcaagtgactgtgattcgagagcataaattgggtgaagagtctgtcaagaagaaaagagctagtttcgtttacaggatgatacacagattagtcaagaaaattcaccaatgttattctatctcaagaacatga

SEQ ID NO: 24 - protein, 359 aa, Arabidopsis thaliana
  G517 polypeptide Paralogous to G2053
MMNPVGFRFRPNDEEIVDHYLRPKNLDSDTSHVDEVISTVDICSFEPWDLPSKSMIKSRDGVWYFFSVKEMKYNRGDQQRRRTNSGFWKKTGKTMTVMRKRGNREKIGEKRVLVFKNRDGSKTDWVMHEYHATSLFPNQMMTYTVCKVEFKGEETEISSSSTGSEIEQIHSLIPLVNSSGGSEGSSFHSQELQNSSQSGVFANVQGESQIDDATTPIEEEWKTWLNNDGDEQRNIMFMQDHRSDYTPLKSLTGVFSDDSSDDNDSDLISPKTNSIGTSSTCASFASSNHQIDQTQHSPDSTVQLVSLTQEVSQGPGQVTVIREHKLGEESVKKKRASFVYRMIHRLVKKIHQCYSISRT

SEQ ID NO: 25 - DNA, 1413 bp, Arabidopsis thaliana
  G592 Predicted polypeptide sequence is paralogous to G3086
aagctattaagatttggttttctacaaatttgttcttcctgaaacgtcacgagacagagcttacaagaagagaaaacagaggaaatttcgttgcattttttttacatattgattcgattaatggattcaaataatcatctctacgacccgaatcccaccgggtcgggtcttcttcgttttagatcagctccgagctctgttctcgccgcttttgttgacgacgacaagattggtttcgactccgataggttgctttcaagattcgtgacctctaatggcgttaacggagatctgggttcacctaaattcgaggataagtctccggtttcgttaacgaacacctctgtttcatacgccgccactctgccgccaccgccgcagcttgagccgtcgagttttctgggtttgccgccgcattacccgaggcagagtaaagggataatgaactcggttggtttggatcagtttctcggtatcaataatcatcacaccaaaccagttgaatctaatcttctccgtcaaagcagctctccagccggaatgtttactaatctctctgaccaaaacggttatggttcaatgaggaatttgatgaattacgaagaagatgaagagagtccatctaattccaatggattaagacgccattgcagtctctcttcaaggccaccttcttcacttggaatgctttctcaaatacctgaaatcgcacccgaaactaattttccatatagccattggaatgatccatccagctttattgataacttatcctcacttaaaagagaagccgaggacgatggaaaattgtttctcggagctcagaacggagagtccgggaatcgtatgcagttactgtcgcatcatttgagcctaccaaagtcatcatcgacagcctcggacatggtttcagtggataagtatcttcagctacaagattctgttccttgtaaaatcagagccaaacgtggttgcgctacacatcctcgaagcatcgctgaacgggtaagaagaacgcggataagcgagcgaatgaggaagttacaagagcttgttcctaacatggacaagcaaaccaacacttcggatatgttggatttagctgtggattacatcaaagatttacaaagacagtataagattttaaacgacaacagagctaactgtaagtgtatgaacaaggagaagaagtcaatatagggcgcaacaaagtgtgtagtagataggactaaaaagcagggagaaggacaagaaagaaacaatgtcatgtctgaatattttttagccgaaacagaccaaattgtctatgtaagctctcgagaaaagcatctgcttccaacaaaattctaagtaataaaatagtactcgatttgttcttatttcattattacaatgcagaatctactaatcaaa

SEQ ID NO: 26 - protein, 359 aa, Arabidopsis thaliana
  G592 polypeptide  Paralogous to G3086
MDSNNHLYDPNPTGSGLLRFRSAPSSVLAAFVDDDKIGFDSDRLLSRFVTSNGVNGDLGSPKFEDKSPVSLTNTSVSYAATLPPPPQLEPSSFLGLPPHYPRQSKGIMNSVGLDQFLGINNHHTKPVESNLLRQSSSPAGMFTNLSDQNGYGSMRNLMNYEEDEESPSNSNGLRRHCSLSSRPPSSLGMLSQIPEIAPETNFPYSHWNDPSSFIDNLSSLKREAEDDGKLFLGAQNGESGNRMQLLSHHLSLPKSSSTASDMVSVDKYLQLQDSVPCKIRAKRGCATHPRSIAERVRRTRISERMRKLQELVPNMDKQTNTSDMLDLAVDYIKDLQRQYKILNDNRANCKCMNKEKKSI

SEQ ID NO: 27 - DNA, 1064 bp, Arabidopsis thaliana
  G1134 Predicted polypeptide sequence is paralogous to G3086
taaagaaagagaaaaaaagctttcgtagtgtctattgaaaccagagaaaagccaaaggggatgcaaccaacatccgtcggtagtagcggcggtggtgacgacggaggaggcagaggaggaggaggagggctaagtagaagtggactatctcggatccgttcagctccagcgacttggcttgaagctttacttgaggaagatgaagaagagtctttgaaacctaatcttggtctcaccgatttgcttaccgggaactcgaacgatttaccgacaagtcgcggctcgttcgagttcccgattcctgttgagcaagggttgtatcaacaaggtgggtttcaccgacagaatagtactccggcggattttcttagtggttctgatggatttatccaaagctttgggattcaggcgaattacgattacttatcggggaatatcgatgtttctccgggaagtaagcggtctagagaaatggaagcactcttctcttctcctgagtttacttctcaaatgaaaggagagcaaagcagcggtcaagttcctaccggagtatcaagcatgtcggatatgaacatggagaaccttatggaggactctgttgcttttagggttcgggctaaacgtggttgcgcaactcatccccgcagcattgccgagagggtacgaaggacgcggattagtgatcggataaggaagctacaagagcttgtacctaacatggacaagcaaaccaacactgcagacatgttagaagaagcagtagaatacgtgaaagttcttcaaaggcagatccaggagttaacagaagaacagaagaggtgcacatgcatacctaaggaagaacaataaggtttgctcctgatttgttttatatttgcttaacggcaatgatctgatcgaaaaattcgaaagatgatcttagcttgaatttagatggatgtcatgttgaaaagtatattatttgataaatggatgtaggtgtaatataaaatttttgtacaataatgaagaaagttaaaaagaattaatgaaaacatatattctttatgatataaaaaaaaaaa

SEQ ID NO: 28 - protein, 262 aa, Arabidopsis thaliana
  G1134 polypeptide Paralogous to G3086
MQPTSVGSSGGGDDGGGRGGGGGLSRSGLSRIRSAPATWLEALLEEDEEESLKPNLGLTDLLTGNSNDLPTSRGSFEFPIPVEQGLYQQGGFHRQNSTPADFLSGSDGFIQSFGIQANYDYLSGNIDVSPGSKRSREMEALFSSPEFTSQMKGEQSSGQVPTGVSSMSDMNMENLMEDSVAFRVRAKRGCATHPRSIAERVRRTRISDRIRKLQELVPNMDKQTNTADMLEEAVEYVKVLQRQIQELTEEQKRCTCIPKEEQ

SEQ ID NO: 29 - DNA, 748 bp, Arabidopsis thaliana
  G1275  Predicted polypeptide sequence is paralogous to G1274
ccaagaaaagggaagatcacgcattcttataggcgtaattcgtaaatagtggtgagtatgaatgatgcagacacaaacttggggagtagtttcagcgatgatactcactctgtgttcgagtttccggagctagacttgtcagatgaatggatggatgatgatcttgtgtctgcggtttccgggatgaatcagtcttatggttatcagactagtgatgttgctggtgctttattctcaggttcttctagctgtttcagtcatcctgaatctccaagtaccaaaacttatgttgctgctacagccactgcttctgccgacaaccaaaacaagaaagaaaagaaaaaaattaaagggagagttgcgttcaagacacggtccgaggtggaagtgcttgacgacgggttcaagtggagaaagtatgggaagaagatggtgaagaacagcccacatccaagaaactactacaaatgttcagttgatggctgtcccgtgaagaaaagggttgaacgagacagagatgatccgagctttgtgataacaacttacgagggttcccacaatcactcaagcatgaactaagactcgaactaaggctcaaggcgaccatgctatattcagcacatcttattttctatggttacgaacgatacttaaaactgcttctagttctttatatccattgtaaactggttgcaggttcacaaattttgagaggtttatgacattctaaatctgtagtacttatata

SEQ ID NO: 30 - protein, 173 aa, Arabidopsis thaliana
  G1275 polypeptide  Paralogous to G1274
MNDADTNLGSSFSDDTHSVFEFPELDLSDEWMDDDLVSAVSGMNQSYGYQTSDVAGALFSGSSSCFSHPESPSTKTYVAATATASADNQNKKEKKKIKGRVAFKTRSEVEVLDDGFKWRKYGKKMVKNSPHPRNYYKCSVDGCPVKKRVERDRDDPSFVITTYEGSHNHSSMN

SEQ ID NO: 31 - DNA, 896 bp, Arabidopsis thaliana
  G1758 Predicted polypeptide sequence is paralogous to G1274
gtccctcctcttagcttcaaccgccggaaaaactaaacaaccttcttggaaaaaaagagaaactaaaaatgaactatccttcaaaccctaaccctagctccacagatttcactgaatttttcaagttcgatgattttgacgatacttttgagaagatcatggaagaaatcggccgtgaggaccactcgtcgtcaccgactttgagttggagttcatcggaaaagttagtggctgcagaaatcacaagcccgcttcaaacaagcctagctacctcacctatgagctttgaaataggtgacaaagatgaaatcaaaaagaggaagagacacaaagaagatccgattattcacgtcttcaaaacgaaatcatcaattgatgaaaaggttgctttagatgatgggtataaatggaggaaatacggaaagaagccgataacgggtagtccatttccaaggcattatcacaagtgttcgagcccagattgcaacgtgaagaagaagatcgaaagagatacgaacaatccagattacatattgacaacatacgaaggtagacataaccacccaagcccttctgtagtttattgtgattcagacgactttgatcttaactctctcaacaattggtcctttcagacggcaaatacgtatagtttctctcattctgctccatattgatcgatcgtagttacaagtttgtgtatatagatgtatatatatatatcaccaattcaccatcgtaatcacgtctcacatgtaactacgtacatatatcttgttcggggttcgttttgtaatgtattgaattggtggaggtagaatggaagtcatcttgtatagttgtacttgtatgtaaggtttgatagtcattttttataaagtaactaatttgtacaa

SEQ ID NO: 32 - protein, 202 aa, Arabidopsis thaliana
  G1758 polypeptide  Paralogous to G1274
MNYPSNPNPSSTDFTEFFKFDDFDDTFEKIMEEIGREDHSSSPTLSWSSSEKLVAAEITSPLQTSLATSPMSFEIGDKDEIKKRKRHKEDPIIHVFKTKSSIDEKVALDDGYKWRKYGKKPITGSPFPRHYHKCSSPDCNVKKKIERDTNNPDYILTTYEGRHNHPSPSVVYCDSDDFDLNSLNNWSFQTANTYSFSHSAPY

SEQ ID NO: 33 - DNA, 549 bp, Arabidopsis thaliana
  G1791 Predicted polypeptide sequence is paralogous to G1792
atgtacatgcaaaaacaaaaaccttaaaagctttcatggaacgtatagagtcttataacacgaatgagatgaaatacagaggcgtacgaaagcgtccatggggaaaatatgcggcggagattcgcgactcagctagacacggtgctcgtgtttggcttgggacgtttaacacagcggaagacgcggctcgggcttatgatagagcagctttcggcatgagaggccaaagggccattctcaattttcctcacgagtatcaaatgatgaaggacggtccaaatggcagccacgagaatgcagtggcttcctcgtcgtcgggatatagaggaggaggtggtggtgatgatgggagggaagttattgagttcgagtatttggatgatagtttattggaggagcttttagattatggtgagagatctaaccaagacaattgtaacgacgcaaaccgctagatcatcactacttacttacagtgtaatgtttttggagtaaagagtaataatcaatataatatactttagtttaggaaaaaaaaaaaaaaaaaaa

SEQ ID NO: 34 - protein, 139 aa, Arabidopsis thaliana
  G1791 polypeptide  Paralogous to G1792
MERIESYNTNEMKYRGVRKRPWGKYAAEIRDSARHGARVWLGTFNTAEDAARAYDRAAFGMRGQRAILNFPHEYQMMKDGPNGSHENAVASSSSGYRGGGGGDDGREVIEFEYLDDSLLEELLDYGERSNQDNCNDANR

SEQ ID NO: 35 - DNA, 450 bp, Arabidopsis thaliana
  G1795 Predicted polypeptide sequence is paralogous to G1792
acaaacacgcaaaaagtcattaatatatggatcaaggaggtcgaggtgtcggtgccgagcatggaaagtaccggggagttcggagacgaccttggggaaaatatgcagcagagatacgagattcgaggaagcacggtgaacgtgtgtggcttggaacgttcgatacggcagaggaagcggctagagcctatgaccaagctgcttactccatgagaggccaagcagcaatccttaacttccctcatgagtataacatggggagtggtgtctcttcttccaccgccatggctggatcttcctccgcctccgcctccgcttcttcttcttctaggcaagtttttgaatttgagtacttggatgatagtgttttggaggagctccttgaggaaggagagaaacctaacaagggcaagaagaaatgagcgagatataattcatgattatttctaa

SEQ ID NO: 36 - protein, 131 aa, Arabidopsis thaliana
  G1795 polypeptide  Paralogous to G1792
MDQGGRGVGAEHGKYRGVRRRPWGKYAAEIRDSRKHGERVWLGTFDTAEEAARAYDQAAYSMRGQAAILNFPHEYNMGSGVSSSTAMAGSSSASASASSSSRQVFEFEYLDDSVLEELLEEGEKPNKGKKK

SEQ ID NO: 37 - DNA, 1353 bp, Arabidopsis thaliana
  G2149 Predicted polypeptide sequence is paralogous to G3086
aatcttttatttttcttttagaaaccaaacttttcagatttctctctctccatttggcgatagaagaagtcatgtaccaatcatcatcctccacgtcatcatcatcgcagagatcatcgcttcccggcggcggaggactgatccgttacggctcagctccgggatcgtttctaaactctgtggttgacgaagtcatcggaggaggctcatcaaacgctcgtgacttcaccggctatcaaccgtcgtcggataacttcatcggtaactttttcaccggagctgctgactcatcctcgctgagatccgattcgacgacttgtggagtcaacaactcatccgacggacagaaacagctaggcaataacaataataataatagtaataaagatatcttcctcgacagatcctacggtggattcaacgagatctcgcaacaacacaagagcaacgacatcggaggaggaaacagctcaggatcttactctctcgctagacaacgtagctctcccgccgatttcttcacctacctcgcctcagataaaaacaatttctcgttgaaccaaccaaccagtgattatagtccgcaaggagggtctaatgggggacgaggacattccagattgaagtctcagctaagcttcacgaatcacgactctctggctcggatcaacgaggtcaatgagaccccagtccacgacggttcaggccattcgttttctgcggctagctttggtgcagccactactgattcttgggatgacggttccggttcgatagggtttaccgtgactaggcccagtaaacgatccaaggacatggactctggtctcttttcgcagtatagtcttccttcagacacttcaatgaactacatggataacttcatgcagcttccagaagattctgtaccctgcaaaatccgggccaaacgcggctgcgccacccatcctagaagcatcgctgagcgggagaggagaacgagaataagtgggaagctaaagaagctacaagatcttgtccccaacatggataagcaaacaagctattcagacatgctggatttagctgtacaacacatcaaaggccttcagcatcaacttcagaatttgaaaaaagatcaagagaattgcacgtgtgggtgcagtgagaaaccaagctagctcaaacccaaaggtagggtcatcctaattttatttgcattgttccgattttatcatatgagagaattagagaagatgtaaataaaatagattatattaaatgtctaatcctcttataattaagctcctcattcgttatcattataagatagaacagtgacaattgtccattatgtttttgtttcaagtttat

SEQ ID NO: 38 - protein, 362 aa, Arabidopsis thaliana
  G2149 polypeptide  Paralogous to G3086
MYQSSSSTSSSSQRSSLPGGGGLIRYGSAPGSFLNSVVDEVIGGGSSNARDFTGYQPSSDNFIGNFFTGAADSSSLRSDSTTCGVNNSSDGQKQLGNNNNNNSNKDIFLDRSYGGFNEISQQHKSNDIGGGNSSGSYSLARQRSSPADFFTYLASDKNNFSLNQPTSDYSPQGGSNGGRGHSRLKSQLSFTNHDSLARINEVNETPVHDGSGHSFSAASFGAATTDSWDDGSGSIGFTVTRPSKRSKDMDSGLFSQYSLPSDTSMNYMDNFMQLPEDSVPCKIRAKRGCATHPRSIAERERRTRISGKLKKLQDLVPNMDKQTSYSDMLDLAVQHIKGLQHQLQNLKKDQENCTCGCSEKPS

SEQ ID NO: 39 - DNA, 1167 bp, Arabidopsis thaliana
  G2555 Predicted polypeptide sequence is paralogous to G3086
ctgtttttgtatccgtgtaaattaatcacacggtagtttttgatgaaaagacaacaatcggagaacaatctggtctgctgctaaaatttaataaattgttttgtctaattgtctccacccataaaaaagcgcgaattcaattcaccgactaaagacattctccggtggagaccccgatgcaatccactcatataagcggcggaagtagcggtggtggtggtggaggaggaggagaggtgagtcgaagtggattatctcggatccgttcagctccagctacttggattgaaaccctactcgaagaagatgaagaagaaggtttaaaacctaacctttgtttaacagagctgcttactggtaataataactctggaggagtgataacgagtcgtgacgactcgttcgagttcctgagttctgttgagcaaggattgtataatcatcatcaaggtggtggctttcaccgtcagaatagttctccggctgattttcttagtgggtctggttctgggactgatgggtatttctctaattttggtattccggcgaattatgactatttgtcgaccaacgttgatatttctccgactaaacggtctagagatatggaaacacagttttcttctcagctgaaagaagagcaaatgagtggtgggatatcaggaatgatggatatgaacatggacaagatttttgaggattcagttccttgtagggttcgtgctaaacgtggttgtgctactcatcctcgtagcattgctgaacgggtgagaagaacgcgaataagtgatcggattaggaggctgcaagagcttgttcctaacatggataagcaaaccaacactgcagacatgttggaagaagctgtggagtatgtgaaggctcttcaaagccagatccaggaattgacagagcagcagaagagatgcaaatgcaaacctaaagaagaacaataatgtatcctttaggatttgatatatctgtattttatttttgtactatctaaaaatggtgatgatctgttcgaaaattcgaaacatgatcttatatattgaactagaaaaaatagatatatatgaattttagctgtaaaatttttgtacaataaggagaaaaagatttagaagagtcaataaaaagatgatgtttacaagtcaaaaaaaaaaa

SEQ ID NO: 40 - protein, 259 aa, Arabidopsis thaliana
  G2555 polypeptide  Paralogous to G3086
MQSTHISGGSSGGGGGGGGEVSRSGLSRIRSAPATWIETLLEEDEEEGLKPNLCLTELLTGNNNSGGVITSRDDSFEFLSSVEQGLYNHHQGGGFHRQNSSPADFLSGSGSGTDGYFSNFGIPANYDYLSTNVDISPTKRSRDMETQFSSQLKEEQMSGGISGMMDMNMDKIFEDSVPCRVRAKRGCATHPRSIAERVRRTRISDRIRRLQELVPNMDKQTNTADMLEEAVEYVKALQSQIQELTEQQKRCKCKPKEEQ

SEQ ID NO: 41 - DNA, 1304 bp, Arabidopsis thaliana
  G2766 Predicted polypeptide sequence is paralogous to G3086
ctttctctcaaaccctctcctcaagattttttcctaagcatcagattagcttttgtagggtttttcttttccggtttcatgtaccctcctaattcctctaagtccaccgctcatgacggcggcggcgatgccgacaccaatcaatatgactcagccgctggagctacccgtgatttctcctctcttggccctcaaacccaccatcatccgccaccgcagcggcagcagcagcatcagcagaatcccaacctcgtcggccattatttaccgggcgagccatcttccatcggattcgattccaacgcttcttcttcgtcttctttgttccgacacagaagctctccggctggattctacgaccaacatcttcccactgatcccaacggtttttctctaggacggccaaacggaggctacggcggaggaggagagcaagggccgtcgaggttgaagtcggagctgagattctctagtgggagtagtagccatcaagaacataattctctaccgcgaatctcggaggttgaagcggctgcagcggctagaaacggtgtcgcatcaagtagtatgagttttggaaataatcgtactaacaattgggacaactcgtcttctcatatcagtttcaccattgatcaacccggaaaacggtccaagaactccgactttttcaccttagaaactcagtatagcatgccgcaaacaactctggaaatggcgacaatggagaacttgatgaacatcccagaggactcggtgccttgtagggctagagccaagcgcggcttcgcgactcacccacgcagcattgctgaaagggagagaagaacgaggataagcgggaagctgaagaagctacaagaacttgtgcctaatatggacaagcaaacgagctacgcagatatgttggatttggctgttgagcatatcaaaggtcttcagcaccaagtagagtcactggaaaagggaatggagagatgtacttgtggggcatgcaagaagcgatgatgaatgatattgttccaagtatgatgcaataaagtatagaagaaaaggagatcacttacgaaccaaattctaagacagaaagaaacatagcaaaaaggagttattttggaggtctaaagaaagtgatgatggattaatgaaggctggttttgttactctctgaaagtcttgacctttattataacttaaaattcgatcaatcgattttttttttcctgttttcctcaaagttggttaattttagcttagagcaaaacccattatttgagattgaaagagatgcgcgtttgtgtgtg

SEQ ID NO: 42 - protein, 309 aa, Arabidopsis thaliana
  G2766 polypeptide  Paralogous to G3086
MYPPNSSKSTAHDGGGDADTNQYDSAAGATRDFSSLGPQTHHHPPPQRQQQHQQNPNLVGHYLPGEPSSIGFDSNASSSSSLFRHRSSPAGFYDQHLPTDPNGFSLGRPNGGYGGGGEQGPSRLKSELRFSSGSSSHQEHNSLPRISEVEAAAAARNGVASSSMSFGNNRTNNWDNSSSHISFTIDQPGKRSKNSDFFTLETQYSMPQTTLEMATMENLMNIPEDSVPCRARAKRGFATHPRSIAERERRTRISGKLKKLQELVPNMDKQTSYADMLDLAVEHIKGLQHQVESLEKGMERCTCGACKKR

SEQ ID NO: 43 - DNA, 1011 bp, Arabidopsis thaliana
  G2989  Predicted polypeptide sequence is paralogous to G2999
taagcttaacataaaccctaatattttcttgatttttttcaagaaaataaaaacataaagatgcttgaagttagatcaatggatatgactccaaaatcaccagaacccgaatccgaaactccgacccggatccaaccagctaaaccaatctctttcagtaacggaatcatcaaacgccaccaccaccaccaccacaacaacaacaaagtcacttacaaagaatgtctcaagaaccacgcggcggcgattggtggtcacgcgcttgacggttgcggcgaatttatgccgtctccttcgtcaacaccttccgatccaacttctctcaagtgtgcagcttgtggttgtcaccgtaacttccaccgccgtgaaactgacgattcctccgccgttccaccaccgtctcttcttccatcttcaacaacaaccgccgcaattgagtatcagcctcatcaccgtcatcatcctcctcctccgctagctcctccgttaccacgtagtcctaattcatcttctccgccgcctatctcttcctcctacatgcttttagctctctccggtaataataaaaccgcaccgttctcagatctaaacttcgccgccgcggctaaccatctctccgccacgcctggctcgaggaagcgattcaggacgaagtttagctcaaatcagaaagagaagatgcatgaattcgccgatcgaatcggttggaagattcagaaacgtgacgaagacgaagttcgtgatttttgccgtgagatcggagttgataaaggtgttctcaaagtttggatgcataataacaaaaactccttcaaattctccggcggaggagcaaccaccgtgcagagaaacgataacggtatcggcggcgagaacagtaacgatgatggagttcgcggtttagctaacgacggtgacggtggtggtgggagatttgagagtgatagtggaggagctgatggtggcggaaacgtaaacgcctcgtcgtcttcgtcgtgaagaagaaaacat

SEQ ID NO: 44 - protein, 312 aa, Arabidopsis thaliana
  G2989 polypeptide  Paralogous to G2999
MLEVRSMDMTPKSPEPESETPTRIQPAKPISFSNGIIKRHHHHHHNNNKVTYKECLKNHAAAIGGHALDGCGEFMPSPSSTPSDPTSLKCAACGCHRNFHRRETDDSSAVPPPSLLPSSTTTAAIEYQPHHRHHPPPPLAPPLPRSPNSSSPPPISSSYMLLALSGNNKTAPFSDLNFAAAANHLSATPGSRKRFRTKFSSNQKEKMHEFADRIGWKIQKRDEDEVRDFCREIGVDKGVLKVWMHNNKNSFKFSGGGATTVQRNDNGIGGENSNDDGVRGLANDGDGGGGRFESDSGGADGGGNVNASSSSS

SEQ ID NO: 45 - DNA, 1107 bp, Arabidopsis thaliana
  G2990  Predicted polypeptide sequence is paralogous to G2999
agtcttttttttcttcaaattattggttatattaatgttttaagctatgatggatatgactcctacaataacaacaacaacaacaccaactcctaaatcacccgaacccgaatccgaaactccgacccggatccaaccggcgaaacccatttcctttagcaacggcatcatcaaacgccaccaccaccaccaccatcctctcctctttacttacaaagaatgtctcaaaaaccacgcggcggctttaggtggtcacgctctcgacggttgcggcgaattcatgccgtctccgtcgtcaatctcctccgatccaacttctctcaaatgtgctgcttgtggctgccaccgtaatttccaccgccgtgatccagataacaacaacgactcttcccaaatccctcctcctccttccaccgccgtagagtatcaacctcaccaccgtcatcatccaccaccaccaccacctcctccaccaccacgtagtcctaactcagcttctcctccaccaatctcttcctcttacatgctcttatctctctccggtactaataacaacaacaacaacttagcttctttctccgatcttaacttctccgccggaaacaaccaccaccaccaccaccaacatactcttcacggatctcgtaaaagattccgaacaaaattcagccagtttcagaaagagaagatgcatgaattcgccgaacgtgttggttggaagatgcaaaaacgtgacgaagacgatgttcgtgatttttgccggcagatcggagttgataaaagtgttctcaaagtttggatgcataacaacaaaaacacctttaaccgccgtgatatcgccggaaacgagatccggcaaatcgataacggcggaggaaaccacactccgattctcgccggcgagattaataaccataacaatggacaccacggtgtcggaggaggaggagagcttcaccagagtgttagtagcggcggtggtggcggaggatttgatagtgatagcggcggagctaacggtggtaacgttaacggatcatcgtcgtcgtgaagttaaagatgagagtgtcaggttaataagaagcttagagtaagcttattcggata

SEQ ID NO: 46 - protein, 334 aa, Arabidopsis thaliana
  G2990 polypeptide  Paralogous to G2999
MMDMTPTITTTTTPTPKSPEPESETPTRIQPAKPISFSNGIIKRHHHHHHPLLFTYKECLKNHAAALGGHALDGCGEFMPSPSSISSDPTSLKCAACGCHRNFHRRDPDNNNDSSQIPPPPSTAVEYQPHHRHHPPPPPPPPPPRSPNSASPPPISSSYMLLSLSGTNNNNNNLASFSDLNFSAGNNHHHHHQHTLHGSRKRFRTKFSQFQKEKMHEFAERVGWKMQKRDEDDVRDFCRQIGVDKSVLKVWMHNNKNTFNRRDIAGNEIRQIDNGGGNHTPILAGEINNHNNGHHGVGGGGELHQSVSSGGGGGGFDSDSGGANGGNVNGSSSS

SEQ ID NO: 47 - DNA, 914 bp, Arabidopsis thaliana
  G2991  Predicted polypeptide sequence is paralogous to G2999
aagtttacaaaacatttcttcttcttgtttttcgaaaccctaaatgttttgagttgtcatggatgtaatagctactacaactactatagtatccgacttggattcacgacaacccgaaatcgaagctccgatccggatccagcccgcgaagcctatttctttctcaaacggcaaacgctgccaccaccatcatcttgcatctgaagcggttgcggttgcgacttataaagaatgtctaaagaatcacgcagcaggtatcggcggtcacgctttagacggatgcggcgagtttatgccgtcaccgtcgtttaactccaatgaccccgcttcactaacgtgcgctgcttgtggttgccaccgtaacttccaccgccgtgaggaggatccatcttctctctctgccatcgtccctgcgatcgaatttcgacctcacaaccgtcaccagcttcctccaccgcctcctcctcatctggcggggattcgtagtccagacgacgatgattcagcttctccaccgccgatctcgtcttcttacatgcttctcgcactctctggaggaagaggaggagctaacacggcggttccaatgtctaggaaacgttttaggacgaagtttagtcagtatcagaaggagaagatgttcgagttctcggagagagttgggtggaggatgccgaaagctgatgacgtggtggttaaggagttttgtcgggagattggagttgataaaagcgttttcaaagtgtggatgcataacaacaagatttcaggacgcagcggcgctagaagagctaacggcggagtagtagtaggaggagtaggagatagtcgtcagagtgttgttccgacaaatgggtcgttttcttcgacgtgaggaaaagaatggaaagcgttgaaaaagcgtcgtcgtttta

SEQ ID NO: 48 - protein, 271 aa, Arabidopsis thaliana
  G2991 polypeptide  Paralogous to G2999
MDVIATTTTIVSDLDSRQPEIEAPIRIQPAKPISFSNGKRCHHHHLASEAVAVATYKECLKNHAAGIGGHALDGCGEFMPSPSFNSNDPASLTCAACGCHRNFHRREEDPSSLSAIVPAIEFRPHNRHQLPPPPPPHLAGIRSPDDDDSASPPPISSSYMLLALSGGRGGANTAVPMSRKRFRTKFSQYQKEKMFEFSERVGWRMPKADDVVVKEFCREIGVDKSVFKVWMHNNKISGRSGARRANGGVVVGGVGDSRQSVVPTNGSFSST

SEQ ID NO: 49 - DNA, 729 bp, Arabidopsis thaliana
  G2992  Predicted polypeptide sequence is paralogous to G2999
atggatttgtcttccaaaccacaacaacaacttctaaactctcttcccatcgccggagaactaactgtcaccggagaaatgggtgtttgttacaaagagtgtttgaaaaaccacgcggctaatctcggcggccatgctctcgacggttgcggcgagtttatgccgagtcccacggctacttccaccgatccttcttctctccgttgcgctgcttgtggctgccaccgtaacttccaccgccgtgacccttccgagaatctcaacttcctcaccgcgcctccgatttcttctccctccggcactgagtcgccgccgtctcgtcacgtgtcttctcctgttccttgctcttactacacctcagctcctccacatcacgtgattctctctctcagctccggtttccctggaccgtcagatcaagatccaacggtggttaggtcagagaacagttcaagaggagcaatgaggaaacgaacaagaaccaaattcacgccggagcagaagatcaagatgagagccttcgcagagaaagctggttggaaaatcaacggatgtgatgaaaagtcggtgagagagttttgtaacgaagttgggattgagagaggagttcttaaagtgtggatgcataacaacaagtactcacttctcaatggcaagatcagagagatcgaacatggcctgtgtctgaacactcacagcaatgatggtgatgggtcttcatcttcttga

SEQ ID NO: 50 - protein, 242 aa, Arabidopsis thaliana
  G2992 polypeptide  Paralogous to G2999
MDLSSKPQQQLLNSLPIAGELTVTGEMGVCYKECLKNHAANLGGHALDGCGEFMPSPTATSTDPSSLRCAACGCHRNFHRRDPSENLNFLTAPPISSPSGTESPPSRHVSSPVPCSYYTSAPPHHVILSLSSGFPGPSDQDPTVVRSENSSRGAMRKRTRTKFTPEQKIKMRAFAEKAGWKINGCDEKSVREFCNEVGIERGVLKVWMHNNKYSLLNGKIREIEHGLCLNTHSNDGDGSSSS

SEQ ID NO: 51 - DNA, 1144 bp, Arabidopsis thaliana
  G2993  Predicted polypeptide sequence is paralogous to G2999
tctctttctctctctctctctctctctctttatcttctttcttcaaagtctatcactttataaaaccctaattaaatctctaaactccttagcctctctctattctcagaaccttgtggttattctcaagaaaggtttcattttgagataaagtttgctgctctttctggttgtggatagatcaaaagaatggagattgcaagtcaagaagatcctattccaataaacactagttatggtaatagtggaggtgggcatgggaacatgaaccatcatcatcatgccaattctgcaccatcatctctcaacattactacttcaaacccactactagtctcctcaaatagtaatggtcttggtaaaaatcatgatcattctcatcatcatcatgtgggttacaacatcatggttaccaacatcaagaaagagaagcctgtggtgataaagtacaaggaatgcctaaagaaccatgcagctaccatgggaggcaatgccattgatggttgtggagagtttatgccaagtggtgaagaaggttccattgaagctctcacttgctcagtttgcaactgccatagaaactttcatagaagagaaaccgaaggtgaagagaaaacattcttttccccttacctcaaccaccaccaaccacctccgcagcagagaaaactcatgttccaccacaagatgatcaaatcaccattaccacaacaaatgataatgcctattggcgttacaaccgctggatccaactcagagtcagaggatcttatggaggaagaaggcggaggaagcttgacattccggcagccaccaccaccaccatcaccgtatagttacggacataatcagaagaaaaggtttaggacaaagtttacacaagagcaaaaggagaagatgattagttttgcggaaagagttggttggaagattcagagacaagaggaatctgttgttcaacagctttgtcaagagattggaattaggagaagagttcttaaagtttggatgcacaacaacaaacaaaatctctccaagaagagcaacaacgttagtaacaatgtcgacctttctgctggtaataacgacattactgaaaatcttgcttctactaatccttagttaagttcagattgttgttata

SEQ ID NO: 52 - protein, 310 aa, Arabidopsis thaliana
  G2993 polypeptide  Paralogous to G2999
MEIASQEDPIPINTSYGNSGGGHGNMNHHHHANSAPSSLNITTSNPLLVSSNSNGLGKNHDHSHHHHVGYNIMVTNIKKEKPVVIKYKECLKNHAATMGGNAIDGCGEFMPSGEEGSIEALTCSVCNCHRNFHRRETEGEEKTFFSPYLNHHQPPPQQRKLMFHHKMIKSPLPQQMIMPIGVTTAGSNSESEDLMEEEGGGSLTFRQPPPPPSPYSYGHNQKKRFRTKFTQEQKEKMISFAERVGWKIQRQEESVVQQLCQEIGIRRRVLKVWMHNNKQNLSKKSNNVSNNVDLSAGNNDITENLASTNP

SEQ ID NO: 53 - DNA, 1083 bp, Arabidopsis thaliana
  G2994  Predicted polypeptide sequence is paralogous to G2999
ccccaaaccaagaaacaatttgcaaagagaaagcaaaaggtttttgaagaagacccaattaaaaaagatggaaattgcaagtcaagaagatcatgatatgcccatcccattaaacactacatttggtggtggtggtagtcatggtcacatgatccatcatcatgatcatcatgctgctaattctgctcctccaactcacaacaacaacaatactactcaaccacctccaatgccgttacatggtaatggtcatggcaacaattatgatcatcatcatcatcaagatcctcatcatgttggttacaacgctatcatcaagaagcctatgataaagtacaaggagtgtctcaagaaccatgcagcagctatgggaggcaatgctactgatgggtgtggagagtttatgccaagtggtgaagatggctccattgaggctctcacttgctcagcttgcaattgccacaggaacttccatagaaaagaagtggaaggcgaactcgcagccaccgccatgtccccttaccaccaacaccctccacaccgaaaactcatgctcaaccaccaaaagatcagatcagctatgccacaccaaatgatcatgcccattggagtctctaactaccggtacatgcataacaactccgagtccgaggactttatggaggaagatggcgtaaccaccgcatctagatcgctaccaaacctgccatacaaccagaagaagaggttcaggacaaagttcacgccggaacagaaggagaagatgcttagttttgctgagaaagttgggtggaaaatacaaaggcaagaagattgtgttgttcaaaggttttgtgaagagattggagtgaagagaagagtgcttaaggtttggatgcacaacaacaagatccatttctccaagaagaacaacattaacctcgaagacaacgacaacgaaaagatcaacaatctcaacaatgttgatctgtccggtaataacgacatgactaagatcgtcccatgatataattaataacgttatttttatatgatctttgataattatttagttatctttatgttagctactagggttttaat

SEQ ID NO: 54 - protein, 312 aa, Arabidopsis thaliana
  G2994 polypeptide  Paralogous to G2999
MEIASQEDHDMPIPLNTTFGGGGSHGHMIHHHDHHAANSAPPTHNNNNTTQPPPMPLHGNGHGNNYDHHHHQDPHHVGYNAIIKKPMIKYKECLKNHAAAMGGNATDGCGEFMPSGEDGSIEALTCSACNCHRNFHRKEVEGELAATAMSPYHQHPPHRKLMLNHQKIRSAMPHQMIMPIGVSNYRYMHNNSESEDFMEEDGVTTASRSLPNLPYNQKKRFRTKFTPEQKEKMLSFAEKVGWKIQRQEDCVVQRFCEEIGVKRRVLKVWMHNNKIHFSKKNNINLEDNDNEKINNLNNVDLSGNNDMTKIVP

SEQ ID NO: 55 - DNA, 782 bp, Arabidopsis thaliana
  G2995  Predicted polypeptide sequence is paralogous to G2999
cagagtataaacgcactagtgagtgaaataagaatcagacatgagctcgttatcaaaaccaaacagacaatttttgtcaccaacaacaaacaaccaagacaccggcagagaacaaacaatcgcctgcgcccgagatatggttgtcttgtacaacgagtgccttaaaaaccacgcggtcagtctcggaggccacgctcttgacggctgcggtgagttcacaccaaagtcaaccaccatcctcacggaccctccgtcccttaggtgcgatgcttgtggctgccatcgcaacttccaccgtcgtagtccttctgacggcttcagtcagcaccggtcaccaccgtctccgttacagctgcagccactcgcccctgttccgaacttgcttctctctcttagctccggtttctttggaccctcggatcaagaagtcaagaacaaatttacggtggaaagggatgttaggaagactgcgatgattaagaaacataagaggacgaaattcacggcggagcagaaggtgaagatgagaggtttcgcggagagagcggggtggaagattaacggctgggatgagaagtgggtgagagagttttgtagtgaagttggaatagagagaaaagttcttaaggtttggatccacaacaataagtactttaacaacgggaggagcagagacacgacgtcctctatgtctttgaatttgaagttgtagatctctttacagtgatgggtcttcatcttcttgagataaggaaaaaccgaaacaaaaagaggttacggta

SEQ ID NO: 56 - protein, 191 aa, Arabidopsis thaliana
  G2995 polypeptide Paralogous to G2999
MVVLYNECLKNHAVSLGGHALDGCGEFTPKSTTILTDPPSLRCDACGCHRNFHRRSPSDGFSQHRSPPSPLQLQPLAPVPNLLLSLSSGFFGPSDQEVKNKFTVERDVRKTAMIKKHKRTKFTAEQKVKMRGFAERAGWKINGWDEKWVREFCSEVGIERKVLKVWIHNNKYFNNGRSRDTTSSMSLNLKL

SEQ ID NO: 57 - DNA, 886 bp, Arabidopsis thaliana
  G2996  Predicted polypeptide sequence is paralogous to G2999
gtttcacatttctcgacttcttgaatggagtttgaagacaacaacaacaacaacgacgaagagcaagaagaggatatgaatcttcatgaggaagaagaagacgacgacgccgtttacgactctcctcctctctctcgtgttctccccaaagcctcgacagaaagtcatgaaaccaccggaactacttccacaggcggtggcggaggattcatggttgttcacggcggtggagggagcaggtttaggttccgtgagtgtctcaagaaccaagcggtgaacataggaggacacgcggtcgatggttgtggtgagtttatgccagctggaatcgaaggtaccatcgacgctctaaaatgcgccgcttgtggctgtcaccgtaacttccaccgcaaggaattaccttacttccatcacgcgccgccacaacatcagcctcctcctcccccgccagggttttaccgtcttccagctccggttagctaccgaccaccaccgtcacaagctcctcctcttcagctcgctcttccccctccacaaagagagagatcagaagatccaatggagacgtcttcagctgaagcaggaggagggattaggaagaggcataggactaagtttacggctgagcaaaaggaaaggatgttagctttagctgagaggattggatggagaattcagagacaagacgatgaagtgattcagagattttgtcaggagactggtgttccgagacaagttcttaaggtttggttacataacaacaaacacactcttggtaagtcgccttcaccacttcatcatcatcaggctcctcctcctccaccaccacagtcttcgtttcatcatgaacaagaccaaccatgaatcttgaatttctttgatcact

SEQ ID NO: 58 - protein, 279 aa, Arabidopsis thaliana
  G2996 polypeptide  Paralogous to G2999
MEFEDNNNNNDEEQEEDMNLHEEEEDDDAVYDSPPLSRVLPKASTESHETTGTTSTGGGGGFMVVHGGGGSRFRFRECLKNQAVNIGGHAVDGCGEFMPAGIEGTIDALKCAACGCHRNFHRKELPYFHHAPPQHQPPPPPPGFYRLPAPVSYRPPPSQAPPLQLALPPPQRERSEDPMETSSAEAGGGIRKRHRTKFTAEQKERMLALAERIGWRIQRQDDEVIQRFCQETGVPRQVLKVWLHNNKHTLGKSPSPLHHHQAPPPPPPQSSFHHEQDQP

SEQ ID NO: 59 - DNA, 895 bp, Arabidopsis thaliana
  G2997  Predicted polypeptide sequence is paralogous to G2999
atactcttaactctcatgaattattggtctctctattatagttttttaagtaacaatctaattgtagtacggatgtctcttgagatgttcaagaattaagaaataaagaaagagggatcggagaatgaattttgaggatcaagaagaagatatggagatgtcaggtgttaatcccccctgcggttacgactctctaagcggtgagggagccacatctagtggtggtggaggagtaggaaggagtaaaggagttggagcgaagataaggtatagagagtgcttgaagaaccatgctgttaacataggtggccacgccgtggacggttgttgcgagtttatgccttccggtgaagatggaacgctcgacgctcttaagtgtgcagcttgcggctgccaccgcaacttccaccgcaaggaaaccgaaagcatcggcggtagagcccacagagttcccacgtactacaaccgcccgccgcagccgcatcagccgcctggatatcttcatctaacatctcccgcggcgccttacaggccacccgcggcatcgggggacgaggaggatacatcaaatcctagcagcagcggcgggaccacgaagaggtttagaacgaagttcacggcggaacagaaagagaagatgttagcctttgcggagaggttggggtggagaattcagaagcatgatgacgtggcggttgagcagttctgtgcggagactggtgttaggagacaagtgcttaaaatctggatgcataacaacaagaactctcttggtaagaaaccctaattttgctcgagacatgatttaaaacactagaggatcataattgtttctttttttggtatgactcttctgtaactacttctgcttattagttatgttattttttcctgg

SEQ ID NO: 60 - protein, 220 aa, Arabidopsis thaliana
  G2997 polypeptide  Paralogous to G2999
MNFEDQEEDMEMSGVNPPCGYDSLSGEGATSSGGGGVGRSKGVGAKIRYRECLKNHAVNIGGHAVDGCCEFMPSGEDGTLDALKCAACGCHRNFHRKETESIGGRAHRVPTYYNRPPQPHQPPGYLHLTSPAAPYRPPAASGDEEDTSNPSSSGGTTKRFRTKFTAEQKEKMLAFAERLGWRIQKHDDVAVEQFCAETGVRRQVLKIWMHNNKNSLGKKP

SEQ ID NO: 61 - DNA, 930 bp, Arabidopsis thaliana
  G2998  Predicted polypeptide sequence is paralogous to G2999
atggatatgagaagccatgaaatgatagagagaagaagagaagacaatggcaacaacaatggtggtgttgttattagtaacatcattagtactaatattgatgataattgcaatggtaataacaacaacactcgtgtctcttgcaactctcaaaccctagatcaccaccaatccaagtctccctcttcgttttccatctccgccgcagctaaacccaccgtaagataccgtgagtgtctaaagaatcatgcggcgagcgtcggcggaagtgttcacgacggatgcggcgagtttatgccgagtggtgaagaaggaacaatcgaagctctcagatgcgctgcttgtgattgtcaccgtaatttccaccggaaagaaatggacggcgttggaagctcggatttgatctctcaccaccgtcatcaccactaccaccataaccaatacggtggaggaggagggagaagacctccgccgccgaatatgatgcttaacccactcatgcttcctccgccaccgaattatcagccgattcaccaccacaagtatggaatgagtcctcccggaggaggaggaatggtgacgccgatgagcgttgcttacggcggtggaggaggaggagctgagtcgtctagtgaagatctgaatctgtacggacaatcaagcggagaaggagctggtgcggcggcgggacaaatggcgttttcgatgtcgtcgtctaagaaaagattcaggacaaagttcacgacggatcagaaggagaggatgatggactttgcggagaagctagggtggaggatgaacaagcaagacgaagaagagcttaagagattctgcggcgagatcggagtgaagagacaagtcttcaaagtttggatgcataacaacaagaacaatgctaagaaaccaccaacaccaacaactactctctaa

SEQ ID NO: 62 - protein, 309 aa, Arabidopsis thaliana
  G2998 polypeptide  Paralogous to G2999
MDMRSHEMIERRREDNGNNNGGVVISNIISTNIDDNCNGNNNNTRVSCNSQTLDHHQSKSPSSFSISAAAKPTVRYRECLKNHAASVGGSVHDGCGEFMPSGEEGTIEALRCAACDCHRNFHRKEMDGVGSSDLISHHRHHHYHHNQYGGGGGRRPPPPNMMLNPLMLPPPPNYQPIHHHKYGMSPPGGGGMVTPMSVAYGGGGGGAESSSEDLNLYGQSSGEGAGAAAGQMAFSMSSSKKRFRTKFTTDQKERMMDFAEKLGWRMNKQDEEELKRFCGEIGVKRQVFKVWMHNNKNNAKKPPTPTTTL

SEQ ID NO: 63 - DNA, 1064 bp, Arabidopsis thaliana
  G3000  Predicted polypeptide sequence is paralogous to G2999
atgggtgataggaaacaaacacacatacgtcatcatcatccttaatttctatttctccttcttcttcatcatcaatatcaatctcatcttccactactcctcccctctaacaataagcagcatctctataatccctaagattcacaatggagcttggaggaaaatgcaatgcaattacaaccacaacaatgatctcaacagaagtaaagccacatacggatccggaaccagaagccaaacccgaatcagatccatccatggctttattcccgatcaagaaagaaaaccaaaaaccaaagacacgtgtcgaccaaggagctaagtaccgggaatgtcagaagaaccacgcggcctcaaccggaggacacgtggtggacggatgctgcgagttcatggccggcggagaagaaggtacactcggtgctttaaaatgcgccgcctgtaactgtcaccggagcttccaccggaaagaagtgtacggacacaggaacagtaaacaagatcatcagctgatgataactccggcgttttacagcagtaacagctcgtacaagccacgtgtaatgcatccaacgggtgagattggacggaggacttcatcttcaagcgaggatatgaagaagattctgagtcatcgtaaccaaaacgttgatgggaaaagtttgatgatgatgatgatgaggaagaagaagagagtgaggacaaagatcaatgaagaacaaaaggagaagatgaaggaatttgcagagagattagggtggaggatgcagaagaaagatgaagaagagattgataagttttgtaggatggtgaatctgaggagacaagtttttaaggtttggatgcataataacaagcaagcaatgaagagaaacaatagtaacattagtgaatagtttgatgatctgataaaagtgaaataaatttttacaatcctgttttgcttttatatataatttttgcccttcaaattattcaaaatcttgagtataaatctgtggaatcttgtatgttttgattgttttatattgtatctgggattatttttttcttttactaaaaaa

SEQ ID NO: 64 - protein, 249 aa, Arabidopsis thaliana
  G3000 polypeptide  Paralogous to G2999
MELGGKCNAITTTTMISTEVKPHTDPEPEAKPESDPSMALFPIKKENQKPKTRVDQGAKYRECQKNHAASTGGHVVDGCCEFMAGGEEGTLGALKCAACNCHRSFHRKEVYGHRNSKQDHQLMITPAFYSSNSSYKPRVMHPTGEIGRRTSSSSEDMKKILSHRNQNVDGKSLMMMMMRKKKRVRTKINEEQKEKMKEFAERLGWRMQKKDEEEIDKFCRMVNLRRQVFKVWMHNNKQAMKRNNSNISE

SEQ ID NO: 65 - DNA, 862 bp, Arabidopsis thaliana
  G3001  Predicted polypeptide sequence is paralogous to G2999
gaactcattttctctcttcttcttcatcatcatcatcaatggatgagataaaaccaaagaaagaagagaattccaaacgacgtcgtaacgtcaaacccatttgccgtgaaactggagaccacgtccattatcttccaacatgcaaaaccaagcccaaacccacgcgtactcatcacgcgccaccaccgatcctcgactcaatcttcaaagtcactcacaagccacactactacgaatgcaggaagaatcacgccgctgatatcggaaccaccgcttacgacggctgcggcgagtttgttagctccaccggtgaagaagattctttaaactgcgccgcatgtggctgtcaccgtaacttccaccgtgaagagttaatcccggagaacggcggcgttactgagacggttcttgaagttctcaagatttcatcgtgtcagtttcgtcggatcttttgctcaccttacggcggtggaaaaagcgaaggaaagaagaagaagaaggagaaggagagttatggaggggatccgataattaaagatcgattcggcggtgcggaggaggaggaggggatagtgaagaggttgaaaacgaagttcacggcggagcaaacggagaaaatgagggattatgcggagaagcttcggtggaaggtgagacctgagaggcaggaggaggttgaagagttttgtgtagagattggagtgaatcggaagaattttaggatttggatgaataatcacaaggataaaattataattgatgaatgattatttaccaaacttaattgtgttacttttcttttcattctactttgttttaatttgtgtttgatttagtgtaatgtataaataacaagctcatt

SEQ ID NO: 66 - protein, 242 aa, Arabidopsis thaliana
  G3001 polypeptide  Paralogous to G2999
MDEIKPKKEENSKRRRNVKPICRETGDHVHYLPTCKTKPKPTRTHHAPPPILDSIFKVTHKPHYYECRKNHAADIGTTAYDGCGEFVSSTGEEDSLNCAACGCHRNFHREELIPENGGVTETVLEVLKISSCQFRRIFCSPYGGGKSEGKKKKKEKESYGGDPIIKDRFGGAEEEEGIVKRLKTKFTAEQTEKMRDYAEKLRWKVRPERQEEVEEFCVEIGVNRKNFRIWMNNHKDKIIIDE

SEQ ID NO: 67 - DNA, 721 bp, Arabidopsis thaliana
  G3002  Predicted polypeptide sequence is paralogous to G2999
ccctaaacgcaaaaatcattactcaaaaaaaaacaaagtctctctcttctaattagagagccaagaagatgcagagtacttgtgtctacagagaatgcatgcgcaaccacgccgcgaagctcggctcttacgccatcgatggctgccgtgaatactctcaaccatccaccggcgatctctgcgtcgcctgtggttgccaccgcagctaccaccgtcgtatagacgtcatatcttctcctcaaatcaatcacacgcgcttcccgttcacgagcttaaggcgcgtgaagcagctggcgaggctgaaatggaaaacggctgaggaaagaaatgaggaggaggaggatgacacggaggagacttcgacggaagagaagatgacggtgcagaggcggaggaagtcaaagttcacggcggagcagagagaggcgatgaaagattacgcggcgaagttgggatggacgttgaaggataagagagcgcttagagaagagataagagtcttctgtgaagggattggtgttactcgttatcattttaaaacttgggttaacaataataaaaagttttatcactaactaattaactaatatccttaattgagataatactataatttagttccaatttcattttcatcccttctgtgttaatttctcctccttgatcgcttattttaatggattattattttatcaaaaaaaaaaaaaaaaaaaaaaaaaaa

SEQ ID NO: 68 - protein, 168 aa, Arabidopsis thaliana
  G3002 polypeptide  Paralogous to G2999
MQSTCVYRECMRNHAAKLGSYAIDGCREYSQPSTGDLCVACGCHRSYHRRIDVISSPQINHTRFPFTSLRRVKQLARLKWKTAEERNEEEEDDTEETSTEEKMTVQRRRKSKFTAEQREAMKDYAAKLGWTLKDKRALREEIRVFCEGIGVTRYHFKTWVNNNKKFYH

SEQ ID NO: 69 - DNA, 579 bp, Oryza sativa (japonica cultivar-group)
  G3380 Predicted polypeptide sequence is orthologous to G1792 Orthologous to G1792
ggtccgatccgtaacagtagtagctagttaatttgattattgtccgtccgcggccggtcagtggtcgcaatcgatcgatcgatatcatggacggcgacggcggcggcggatgggacgatcagggcaacggcggcggcgagacgaccaagtaccgtggcgtgcgtcgccggccttctggcaagttcgcggcggagatccgtgactccagcaggcagagcgtccgcgtctggctgggaaccttcgacaccgccgaggaggctgcgcgggcttacgaccgcgccgcctacgccatgcgcggccacctcgccgtcctcaacttccctgctgaggcgcgcaactacgtgcggggatcaggctcgtcgtcctcgtcccgacagcatcagcagcggcaggtgatcgagctggagtgcctagacgaccaagtgctgcaagagatgctcaagggtggcgacgatcagtacaggtcagcagctgggagcaagaggaataactactagctatatatgctgctaacctacttacaatcgcgatacatatcgaggtttggggattttcttctcacctgtgtgcagaggctgc

SEQ ID NO: 70 - protein, 136 aa, Oryza sativa (japonica cultivar-group)
  G3380 polypeptide  Orthologous to G1792
MDGDGGGGWDDQGNGGGETTKYRGVRRRPSGKFAAEIRDSSRQSVRVWLGTFDTAEEAARAYDRAAYAMRGHLAVLNFPAEARNYVRGSGSSSSSRQHQQRQVIELECLDDQVLQEMLKGGDDQYRSAAGSKRNNY

SEQ ID NO: 71 - DNA, 514 bp, Oryza sativa (japonica cultivar-group)
  G3381 Predicted polypeptide sequence is orthologous to G1792
atcgatcatctgctacgaactcaccctatatatatatactccatcttaggagctgcttgatcgatcgacatatatataactaatggatcatcatcatcagcagcagcagcaggagggtgagctggtggccaagtacaggggcgtgcggcggcggccgtggggcaaattcgcggcagagatccgcgactcgagccggcacggcgtccgcgtgtggctgggcaccttcgacacagccgaggaggccgctcgcgcctacgaccgctccgcctactccatgcgcggcgccaacgccgtcctcaacttccccgccgacgcccacatctacgcccgtcaactacacaataataacgccgctgctggctcttcatcttcctcttccgccgccgccgcagcagccaggccgccgccgatcgagttcgagtacctcgatgaccacgtcctgcaggagatgctccgagaccacaccaccaacaagtagcttactactccactatatatgctgcctgctgcttgt

SEQ ID NO: 72 - protein, 131 aa, Oryza sativa (japonica cultivar-group)
  G3381 polypeptide  Orthologous to G1792
MDHHHQQQQQEGELVAKYRGVRRRPWGKFAAEIRDSSRHGVRVWLGTFDTAEEAARAYDRSAYSMRGANAVLNFPADAHIYARQLHNNNAAAGSSSSSSAAAAAARPPPIEFEYLDDHVLQEMLRDHTTNK

SEQ ID NO: 73 - DNA, 375 bp, Oryza sativa (japonica cultivar-group)
  G3383 Predicted polypeptide sequence is orthologous to G1792
atggaggacaaccggagcaaggacacggcgaccaagtaccgcggcgtgaggaggcggccgtggggcaagttcgcggcggagatccgcgacccggagcgcggcggggcgcgcgtctggctcggcaccttcgacaccgccgaggaggcggcgcgtgcctacgaccgcgcggcctacgcccagcgcggcgccgccgccgtgctcaacttcccggccgccgccgccgccggcaggggtggaggagccggcggcgccgcttccgggtcgtcgtcgtcgtcgtccgcgcagcgcggcaggggcgacaagatcgagttcgagtacctcgacgacaaggtgctcgacgatctcctcgacgacgagaagtaccgtggtaaatga

SEQ ID NO: 74 - protein, 124 aa, Oryza sativa (japonica cultivar-group)
  G3383 polypeptide  Orthologous to G1792
MEDNRSKDTATKYRGVRRRPWGKFAAEIRDPERGGARVWLGTFDTAEEAARAYDRAAYAQRGAAAVLNFPAAAAAGRGGGAGGAASGSSSSSSAQRGRGDKIEFEYLDDKVLDDLLDDEKYRGK

SEQ ID NO: 75 - DNA, 466 bp, Oryza sativa (japonica cultivar-group)
  G3515 Predicted polypeptide sequence is orthologous to G1792
gtgtgcgagcggttgcgtccgcatggaggacgacaagagtaaggaggggaaatcgtcgtcgtcgtaccgcggcgtgcggaagcggccgtggggcaagttcgcggcggagatccgcgacccggagcgcgggggagcccgcgtgtggctcggcacgttcgacaccgcggaggaggccgcgcgggcgtacgaccgcgccgcattcgccatgaagggcgccacggccatgctcaacttcccgggagatcatcatcacggcgccgcaagcaggatgaccagcaccggctcttcttcgtcctccttcaccacgcctcctccggcgaactcctccgcggcggcgggccgcggcggctccgatcggacgacggacaaggtggagctggagtgcctcgacgacaaggtcctggaggacctcctcgcggagaccaactatcgtgataagaactactagctagctagctactatggc

SEQ ID NO: 76 - protein, 141 aa, Oryza sativa (japonica cultivar-group)
  G3515 polypeptide  Orthologous to G1792
MEDDKSKEGKSSSSYRGVRKRPWGKFAAEIRDPERGGARVWLGTFDTAEEAARAYDRAAFAMKGATAMLNFPGDHHHGAASRMTSTGSSSSSFTTPPPANSSAAAGRGGSDRTTDKVELECLDDKVLEDLLAETNYRDKNY

SEQ ID NO: 77 - DNA, 393 bp, Zea mays
  G3516 Predicted polypeptide sequence is orthologous to G1792
atggaggacgacaagaaggagggcaagtaccgcggcgtgcggaagcggccgtggggcaagttcgccgcggagatccgggacccggagcgcggcggctcccgcgtctggctcggcaccttcgacaccgccgaggaggccgccagggcctacgaccgcgccgcattcgccatgaagggcgccacggccgtgctcaacttccccgccagcggaggatcgtcagctggcgcggctcccggcggccggaccagcggcggctcctcctcgtccaccacgtcggctccggccagcagggggagggcccgtgttcccgactcggagaaggtggagctggagtgcctcgacgacagggtcttggaagagctgctcgcggaagacaagtacaacaagaactaa

SEQ ID NO: 78 - protein, 130 aa, Zea mays
  G3516 polypeptide  Orthologous to G1792
MEDDKKEGKYRGVRKRPWGKFAAEIRDPERGGSRVWLGTFDTAEEAARAYDRAAFAMKGATAVLNFPASGGSSAGAAPGGRTSGGSSSSTTSAPASRGRARVPDSEKVELECLDDRVLEELLAEDKYNKN

SEQ ID NO: 79 - DNA, 477 bp, Zea mays
  G3517 Predicted polypeptide sequence is orthologous to G1792
tacgtccgatccacagccatcatcgccacccgcgcgcttatggatggcgagtggtccaaggacggcggaggcggcgagccgaccaagtaccgcggcgtgcggcgtcggccctggggcaagtacgcggcggagatccgcgactcgagccggcacggcgtccgcatctggctcggcacgttcgacaccgccgaggaggccgccagggcgtacgaccgctccgccaactccatgcgcggcgccaacgccgtgctcaacttcccggaggacgcgcccgcctacgccgccgccgcctcccgtggctccgccggcggatcctcgtccagaccggcgggctccggccgggacgtgatcgagtttgagtacctcgacgacgaggtgctgcaggagatgctcaggagccaggagccgtcggcggcggcggcgcagaagaagaagtagcgcgagcgccacaggtggcgaaacggccgcttttccaaa

SEQ ID NO: 80 - protein, 132 aa, Zea mays
  G3517 polypeptide  Orthologous to G1792
MDGEWSKDGGGGEPTKYRGVRRRPWGKYAAEIRDSSRHGVRIWLGTFDTAEEAARAYDRSANSMRGANAVLNFPEDAPAYAAAASRGSAGGSSSRPAGSGRDVIEFEYLDDEVLQEMLRSQEPSAAAAQKKK

SEQ ID NO: 81 - DNA, 717 bp, Glycine max
  G3518 Predicted polypeptide sequence is orthologous to G1792
ctaacacacataacaataacttagcaacattttttccttccttctttctttctttctatactttttgttgttaattctaagttctaagagaagaaaaatggagggtggaagatcatcagtttcaaatgggaatgttgaggttcgttatagagggattagaagaaggccatggggaaagtttgcagcagagattcgtgaccctacaaggaaaggaacaaggatatggcttggaacatttgacactgctgaacaagctgcacgagcttatgatgctgctgcttttcattttcgtggccacagagcaattctcaacttcccaaatgagtatcaatctcataatccaaactcttctttgcctatgcctctagctgtgtcagctcctccttcttattcttcttcttcttccacttctaattattccggtgatgataataataaccaccttgtgagaccagctttttctggagaaataatgcaaggtggtgatcatgatgatgatacttttgagttggagtacttcgataataagttgctcgaggaactccttcagatgcaagataacagacacttctaaaagtaaaatataacacaagccagctatgttgtgttagtcactggcatgaaataaaatgcaaagaaatattgttgattttatttaatatattttgtttgatttttttttttttttttgtagctgatcaaagttcttcgaaatga

SEQ ID NO: 82 - protein, 158 aa, Glycine max
  G3518 polypeptide  Orthologous to G1792
MEGGRSSVSNGNVEVRYRGIRRRPWGKFAAEIRDPTRKGTRIWLGTFDTAEQAARAYDAAAFHFRGHRAILNFPNEYQSHNPNSSLPMPLAVSAPPSYSSSSSTSNYSGDDNNNHLVRPAFSGEIMQGGDHDDDTFELEYFDNKLLEELLQMQDNRHF

SEQ ID NO: 83 - DNA, 609 bp, Glycine max
  G3519 Predicted polypeptide sequence is orthologous to G1792
tttctttctttctatactttttgtggttctgattattaagttctaagagaataacaatggagggtggaagatcatctgtttcaaatgggaattgtgaggttcggtatagagggattagaagaaggccatggggcaagtttgcagcagagattcgtgaccctacgaggaaagggacaaggatatggcttggaacatttgacactgcggaacaagctgctcgagcttatgatgctgctgcttttcattttcgtggtcatagagcaattctcaacttcccaaatgagtaccaatctcataatccaaactcttctttgcctatgcctctaattgtgcctcctccttcttattcttcttctttcacttctaattattctgctgatgataataaccaccttgtgagacctggagaaataatgcaaggtggtgatcttgatgacacttttgagttggagtacttggataataagttgctcgaggaactccttcagatgcaagataacagacacttctaaaagtaaaatataacacaagccagctatgttgtgttagtcactggcatgaaataaaatgcaaagaaatattgttgattttatttaatatattttgttt

SEQ ID NO: 84 - protein, 151 aa, Glycine max
  G3519 polypeptide  Orthologous to G1792
MEGGRSSVSNGNCEVRYRGIRRRPWGKFAAEIRDPTRKGTRIWLGTFDTAEQAARAYDAAAFHFRGHRAILNFPNEYQSHNPNSSLPMPLIVPPPSYSSSFTSNYSADDNNHLVRPGEIMQGGDLDDTFELEYLDNKLLEELLQMQDNRHF

SEQ ID NO: 85 - DNA, 440 bp, Glycine max
  G3520 Predicted polypeptide sequence is orthologous to G1792
aaggcacacaatggaagaggagtcaaaggagaaaaagaaggacactaaggaggaaccacgttatagaggagtgcggcggcggccgtgggggaagttcgcggccgagattcgggacccggcccggcacggtgcccgagtgtggctggggacatttctcacggcggaggaggctgctagggcttatgaccgagctgcctatgagatgaggggcgctttagccgttctcaattttccaaatgagtatccttcatgctcttctatgaactcatcttcaacattagcaccttcatcttcttcttcaaattcaatgcttaaaagtgatcatggtaaacaagttattgagttcgagtgcttggatgacaaattgttagaggaccttcttgattgtgatgactatgcctacgagaaagacttgcctaagaactgaacggtttgatcaa

SEQ ID NO: 86 - protein, 138 aa, Glycine max
  G3520 polypeptide  Orthologous to G1792
MEEESKEKKKDTKEEPRYRGVRRRPWGKFAAEIRDPARHGARVWLGTFLTAEEAARAYDRAAYEMRGALAVLNFPNEYPSCSSMNSSSTLAPSSSSSNSMLKSDHGKQVIEFECLDDKLLEDLLDCDDYAYEKDLPKN

SEQ ID NO: 87 - DNA, 1082 bp, Glycine max
  G3643 Predicted polypeptide sequence is orthologous to G47
ccacgcgtccgcttcttctctcagaatacacaacacaaagtcaatataattatagtatatccctatgagtaggagttcggcgatgcatggaattacaagcacaaacaacaagttgaagggagttcggcgtcgaaaatggggcaaatgggtgtcggagattcgtgttccgggcacgcaagagcgtttgtggttgggaacctacgccacgccggaggctgccgcggtggctcacgacgttgccgtctactgtctaagtaggccttcttcgttggacaaacttaacttccccgaaaccttgtcttcgtacagtgttcagctcagggacatgtctccgaggtctgtgcagaaggtggcttccgatgttggcatggatgttgatgcaagaaacattgttgcgggcaaaacttcaacggtgggggcagaaactaattgcgagagtgatgagaggactagtactgcgtctgtgtgtaatgttgttggagaaggtggtgctgatcattcggatgtgttttggtgggatgatgatggtgggtcttggcatggaagtggtggagattctacggaaagggatgccttgagcatttccattgaagattatctttagctgttctaggtttcaactttagttatctttttttttttttttttgagttatgatcgatgcgcatagttagtagttacagataattactgctagtgttgggtgtttaaacggtcagagatgatgatatataaatttgatgtgcgctagctgcctttttgaagaaactaaaaaaaggtaaaacaagaaagattgtacccccaaaatgaacttggtcaatttcacactttcacgccatttgcattttgtgcacgttgttagttttcaaattgttaattcccttgctaaacccactcaaacttgagtgcgttcaccttttattaccacgtagtaactgagagttaacgaaaatatttctttataaaaattatttaccatttagtgtctttcgtttacttgtaattattcaacttgtcaataagatgaaagttctaattttagatataataaaattcagctagtatttgtgaattactcactt

SEQ ID NO: 88 - protein, 179 aa, Glycine max
  G3643 polypeptide  Orthologous to G47
MSRSSAMHGITSTNNKLKGVRRRKWGKWVSEIRVPGTQERLWLGTYATPEAAAVAHDVAVYCLSRPSSLDKLNFPETLSSYSVQLRDMSPRSVQKVASDVGMDVDARNIVAGKTSTVGAETNCESDERTSTASVCNVVGEGGADHSDVFWWDDDGGSWHGSGGDSTERDALSISIEDYL

SEQ ID NO: 89 - DNA, 687 bp, Oryza sativa (japonica cultivar-group)
  G3644 Predicted polypeptide sequence is orthologous to G47
atgccttttgtacgtacacttgctttcccaacgctcgcgaatcaaatcgagggtgaaattaagtcaagaacggagagagatcacggtgaggttgatctcagctcgccggaggaggcaatgagccgggcggagtgcggcggcggcgaggaggaggagcggtgcaggtacaggggcgtgcggcggcggcggtgggggaagtgggtgtcggagatccgggtgcccggcacgcgggagcggctgtggctggggtcctacgccacgccggaggccgccgccgtcgcgcacgacacggccgtctacttcctccgcggaggcgcgggcgacggcggtggcggcggcgcgacgctcaacttcccggagcgcgcggcggccacgtacggcggcggcgccgccgtggcgcgcctgtcgccgcggtccgtgcagcgcgtggcgtccgacgccggcatggccgccgacgcgcagctcgtggcggcgcgggacgccgcgcccgcgcccgcgccggcgacggcgtacgcgcgcccggatcactgcgccggcgcgacgacggcgcggcacgacgagctggcgcgccgcgggatgtacggcgctcacgcgcatgccgccggcgcgaacgccaggacgagcggcgagcggcagctcgtctgtgccgaggagattagcgtggatgacatggagatcctgatgtaa

SEQ ID NO: 90 - protein, 228 aa, Oryza sativa (japonica cultivar-group)
  G3644 polypeptide  Orthologous to G47
MPFVRTLAFPTLANQIEGEIKSRTERDHGEVDLSSPEEAMSRAECGGGEEEERCRYRGVRRRRWGKWVSEIRVPGTRERLWLGSYATPEAAAVAHDTAVYFLRGGAGDGGGGGATLNFPERAAATYGGGAAVARLSPRSVQRVASDAGMAADAQLVAARDAAPAPAPATAYARPDHCAGATTARHDELARRGMYGAHAHAAGANARTSGERQLVCAEEISVDDMEILM

SEQ ID NO: 91 - DNA, 656 bp, Brassica rapa subsp. Pekinensis
  G3645 Predicted polypeptide sequence is orthologous to G47
cccacgcgtccgatggattacatcgacaacaccgtcgaaactcaatcaaagtacaaaggcatccgtcgccggaaatgggggaaatgggtatcggagattcgagttccgggaactcgcgaccgtctctggttaggctcattctccacggcggaaggcgcagccgtggcgcacgacgtggctttctactgtttacaccaaccaaactcgctcgaatctctcaacttccctcacttgcttcctccttccattgtttccaagacttcgccgaggtctatccagcaagctgcttctaatgccggaatggccgttgacgccggaatcgttaacagctgtgatcacgcgtcagggaactctgggaatggagatacaacgacggcgtattgtgagaatggaggtgcgttgaatatatcagtgtatgattatttggacggtcacgatcacgtttgaacttcatcttcttgttttttcgtttaaagatacagctactcaaaagaagcagtgatggagcctggtgtgtaagcaagcaaaacgttgtgaatatatataccggtatgtttcgctgttggcccaatgcaagaaacttttgtagtacgaatatatatattttattttgaatgccttcaagaggattataatgcgagtgaagctttgtttca

SEQ ID NO: 92 - protein, 144 aa, Brassica rapa subsp. Pekinensis
  G3645 polypeptide  Orthologous to G47
MDYIDNTVETQSKYKGIRRRKWGKWVSEIRVPGTRDRLWLGSFSTAEGAAVAHDVAFYCLHQPNSLESLNFPHLLPPSIVSKTSPRSIQQAASNAGMAVDAGIVNSCDHASGNSGNGDTTTAYCENGGALNISVYDYLDGHDHV

SEQ ID NO: 93 - DNA, 649 bp, Brassica oleracea
  G3646 Predicted polypeptide sequence is orthologous to G47
cagccgcataacatattactattccccctggtcatatctttgacttttatttttatttgctctaacctaaaagtattatataagtattgcacaattcatacaatcggaattgactttcttctcctccaatcgtatttttattcaacagttcctctcaagatcatcaactcaaaaaatggatcctagagacggcggagaaacccatcaggccaagtacaaaggcatccgtcgccggaaatggggaaaatgggtatcggagattagggttccagcaactcgtgaacgactctggttaggctctttctccaccgccgaaggagctgcggtagcccacgacgtcgctttttactgcttgcaccgaccatcttctctcgacaacgaagcttttaacttccctcacttgctgcaaccttcccttgcctccaacacatctcctaagtccatacaaaaagctgcttcggacgcaggcatgggcgtagacgcaggattcgccctaaacaacgacagcgcgagtggtggcgtggaggaaggcaccgaacgggaaacgttgaacatctccgtgtacgattatctagacgacggtcgcatttgatatattggtttatatctacgagcaccttatattagtaattaatataggatgtgaata

SEQ ID NO: 94 - protein, 138 aa, Brassica oleracea
  G3646 polypeptide  Orthologous to G47
MDPRDGGETHQAKYKGIRRRKWGKWVSEIRVPATRERLWLGSFSTAEGAAVAHDVAFYCLHRPSSLDNEAFNFPHLLQPSLASNTSPKSIQKAASDAGMGVDAGFALNNDSASGGVEEGTERETLNISVYDYLDDGRI

SEQ ID NO: 95 - DNA, 495 bp, Zinnia elegans
  G3647 Predicted polypeptide sequence is orthologous to G47
attcgcggccgcgaatatgagtaccagctcagatgaaggtaacaactgtttaagccaaaagacttacaaaggcgttaggtgccgacgatggggcaaatgggtgtcagagattcgagttccaggaagtcgagaacggctctggctaggcacgtactctacgcctgagggtgcagctgtggctcatgatgtagcctcgtactgtttaaaagggaatacgtcttttcataaacttaatattccgtctatgttacctccgacagcacggacagacctatctcctaggtccatccaaaaggctgcgtctgatgctggtatggccatagacgcacggtttatcgcgtctagagataccacaccgactaatgaggcgttgaacatttctgtagatgattatctttaaattttgagaactaatattgtgtcaccaatattgtaagtcgatctacattggcaaacacaatgtacgtgtttggtggcacttccagattattgttt

SEQ ID NO: 96 - protein, 127 aa, Zinnia elegans
  G3647 polypeptide  Orthologous to G47
MSTSSDEGNNCLSQKTYKGVRCRRWGKWVSEIRVPGSRERLWLGTYSTPEGAAVAHDVASYCLKGNTSFHKLNIPSMLPPTARTDLSPRSIQKAASDAGMAIDARFIASRDTTPTNEALNISVDDYL

SEQ ID NO: 97 - DNA, 594 bp, Oryza sativa (japonica cultivar-group)
  G3649 Predicted polypeptide sequence is orthologous to G47
atgggccgggtggcggcgagcggcggcggcggcggcggaggggagatgatgaggtacaggggcgtgcggcggcggcggtgggggaagtgggtgtcggagatccgggtgcccgggacgcgggagcgcctgtggctcggctcctacgccaccgccgaggccgccgccgtcgcgcacgacgccgccgtctgcctcctccggctcggcggcggccgccgcgccgccgcaggcggaggcggcgggctcaacttccccgcccgcgcgctcgccgcggcggcggccgcctcctcctacggcggcgccggcggtctcctgtccccgcgctccgtgcagcgcgtggcgtccgacgccggcatggccgccgacgcgcagctcgtggacctgcgccgcgaccacccgcccgccgccgccgccgcctcatcctccggcagcggcgtggcgggagacggtgcaagaaagcaagggacacgtggcgaggttagcgacacgtattggtgtaggaatggagaggatgggagcagaagccggagctccgggagtgaggagctcattgtttacgagggcttaagtgtagatgacatggaaattttgatgtaa

SEQ ID NO: 98 - protein, 197 aa, Oryza sativa (japonica cultivar-group)
  G3649 polypeptide  Orthologous to G47
MGRVAASGGGGGGGEMMRYRGVRRRRWGKWVSEIRVPGTRERLWLGSYATAEAAAVAHDAAVCLLRLGGGRRAAAGGGGGLNFPARALAAAAAASSYGGAGGLLSPRSVQRVASDAGMAADAQLVDLRRDHPPAAAAASSSGSGVAGDGARKQGTRGEVSDTYWCRNGEDGSRSRSSGSEELIVYEGLSVDDMEILM

SEQ ID NO: 99 - DNA, 702 bp, Oryza sativa (japonica cultivar-group)
  G3651 Predicted polypeptide sequence is orthologous to G47
atggctgacctcccatgcatatatatacgcgtagtacgtacacttgctttcccaacgctcgcgaatcaaatcgagggtgaaattaagtcaagaacggagagagatcacggtgaggttgatctcagctcgccggaggaggcaatgagccgggcggagtgcggcggcggcgaggaggaggagcggtgcaggtacaggggcgtgcggcggcggcggtgggggaagtgggtgtcggagatccgggtgcccggcacgcgggagcggctgtggctggggtcctacgccacgccggaggccgccgccgtcgcgcacgacacggccgtctacttcctccgcggaggcgcgggcgacggcggtggcggcggcgcgaccgctcaacttcccggagcgcgcggcggccaccgtacggcggccgccgtggcgcgcctgtcgccgcggtccgtgcagcgcgtggcgtccgacgcggcatggccgccgacgcgcagctcggcgtgccgggacccggcccggcccgcgccggcgacggcgtacgcgcgcccggatcactgcgccggcgcgacgacggcgcggcacgacgagctggcgcgccgcgggatgtacggcgctcacgcgcatgccgccggcgcgaacgccaggacgagcggcgagcggcagctcgtctgtgccgaggagattagcgtggatgacatggagatcctgatgtaa

SEQ ID NO: 100 - protein, 233 aa, Oryza sativa (japonica cultivar-group)
  G3651 polypeptide  Orthologous to G47
MADLPCIYIRVVRTLAFPTLANQIEGEIKSRTERDHGEVDLSSPEEAMSRAECGGGEEEERCRYRGVRRRRWGKWVSEIRVPGTRERLWLGSYATPEAAAVAHDTAVYFLRGGAGDGGGGGATAQLPGARGGHRTAAAVARLSPRSVQRVASDAAWPPTRSSACRDPARPAPATAYARPDHCAGATTARHDELARRGMYGAHAHAAGANARTSGERQLVCAEEISVDDMEILM

SEQ ID NO: 101 - DNA, 855 bp, Lotus corniculatus var. japonicus
  G3663  Predicted polypeptide sequence is orthologous to G2999
atggaaatgagagagatgccttccactttgatatataatctccccaacagagattcctcttctccatctctaccttcaagtagtgatcagccttctcaaactcacacaataatcttcaatcatccacctaaactttctcataaccaccaccatcatatttataccccttcttctacttctcctcctcttccaccaaactcagttcaacttcaacaacaacccacaagagatccagatccaagttcttcttcttctctattaattagatacagagaatgcctgaggaaccatgcagcgagattagggagtcatgtcacagatggatgtggcgagttcatgccaaatggagaacaaggaaccccagaatcattgatctgtgctgcttgcgagtgccaccgcaattttcacagaaaagaggctcaaggagaacctcaacaagtttccaactatcatcacaacaaaagcaatggtcagaacaggattcacccttcttctctgcatcataaacatggattttcttcgtcaccagggttgatgatgggctttgggggaggcagtggaggccctgcagctgaatcctcaagtgaagatctcaacatgtttcaccagtccaatgatggaggccaattatcagtgcagccaccactatcatcaaagaagaggttcagaactaagttcacccagcaacaaaaggacaggatgatggagtttgctgagaaactggggtggaagatccagaagcaagatgaagaggaagtgaagcaattctgctctcatgttggtgtaaaaagacaggctttcaaggtttggatgcacaatagcaagcaagcaatgaagaagaagcaaatcatgtaa

SEQ ID NO: 102 - protein, 284 aa, Lotus corniculatus var. japonicus
  G3663 polypeptide  Orthologous to G2999
MEMREMPSTLIYNLPNRDSSSPSLPSSSDQPSQTHTIIFNHPPKLSHNHHHHIYTPSSTSPPLPPNSVQLQQQPTRDPDPSSSSSLLIRYRECLRNHAARLGSHVTDGCGEFMPNGEQGTPESLICAACECHRNFHRKEAQGEPQQVSNYHHNKSNGQNRIHPSSLHHKHGFSSSPGLMMGFGGGSGGPAAESSSEDLNMFHQSNDGGQLSVQPPLSSKKRFRTKFTQQQKDRMMEFAEKLGWKIQKQDEEEVKQFCSHVGVKRQAFKVWMHNSKQAMKKKQIM

SEQ ID NO: 103 - DNA, 1162 bp, Flaveria bidentis
  G3668 Predicted polypeptide sequence is orthologous to G2999
gttttttttttttttttttttttttttttttttgtcaaagcagaacagaattgcatacgtaggtaacattgcatacacttgcacactctaaacacacacttttgctttattatttttttttgcaggcgatgggttaattcatgtccacaccctcttctttcacttatcctctgatcaacctcacatcacccaccattgcctctccatcttattcaccatcattcatcctaatctgtttcttaattcacctctcgttgttaatcacatcggagcttataattcactaatggagtttgatgaacacgatgagcaggaagaggaggtcggaattcagctcactccggggagttttgacgccgtcgggaactccggccggaggaaatccggtggcggtggcggtggcggtggatacaggtataaggaatgtttgaagaaccacgcggtaggcattggcggtcaggcggtggacggatgtggagagtttatggctgccggagatgaaggtaccttagatgcactaaagtgcgccgcgtgcaattgtcaccggaacttccatcggaaggaggtggagggacaacaacggcagcatcaacaccagcagcaagctgcgttacagcaccagtatatcaccgcgacgccgtactaccaccaccaccaccggccgacgggatacctgcacatgaaaccgcctccgtcgtcgctccaccagcggcagctggctctcccgtcgacgtctcgagatgatctggatgagatctcaaaccctagctccagcggtggcggtggcgttggtggaagcggttcgaagaagagattccgaacgaaattcacacaggatcagaaggatcggatgctggcgttctcggaggcgttagggtggcgtattcagaagcacgatgaggccgccgtgcaacaattctgcaacgaaaccggcgttaaacgccacgttcttaaggtctggatgcacaataataagcacacaatcggtaagaaaccctaattttgcaacaaaaacgaacaagctacagaaattattaatggaatctcattcgtaggatcgatttcagtgtcgtttaggtagtatttttgtttgatttctatcgttgtgatcgtagtctcttaatttaactcgatctgaatgttgattaatcgtttgatttcc

SEQ ID NO: 104 - protein, 237 aa, Flaveria bidentis
  G3668 polypeptide  Orthologous to G2999
MEFDEHDEQEEEVGIQLTPGSFDAVGNSGRRKSGGGGGGGGYRYKECLKNHAVGIGGQAVDGCGEFMAAGDEGTLDALKCAACNCHRNFHRKEVEGQQRQHQHQQQAALQHQYITATPYYHHHHRPTGYLHMKPPPSSLHQRQLALPSTSRDDLDEISNPSSSGGGGVGGSGSKKRFRTKFTQDQKDRMLAFSEALGWRIQKHDEAAVQQFCNETGVKRHVLKVWMHNNKHTIGKKP

SEQ ID NO: 105 - DNA, 813 bp, Lotus corniculatus var. japonicus
  G3670  Predicted polypeptide sequence is orthologous to G2999
atggagtttgatgagcaagaagagcaagatgaagaaatggggatcccggagtcaccgccgccggtgccggcgagttacgacccgcttttgaactcagcaccgagatccaaaatcgcagaggtttcagcgcctgtaatcgggaggaaaggcggctcgtttaccccgccggtggcagcgggggttgtgaggtacagggaatgccagaagaaccacgccgtcagcttcggcggccacgccgtcgacgggtgctgcgagttcatggctgccggagatgaaggcacgctggaggctgtgatctgcgccgcctgtaactgtcaccggaacttccaccgcaaggagatcgacggcgaaacagtggcctcgtgccagaggcagcagcctccgcctcctccggtgcaccaccaccagtaccacagccaattctccccttactaccaccgtggacctcagcaccatgccgcctccggcggctacctccaccaccacctgacaacatctccgacggcgccccaccggccgttagcacttccaccggcgacttcaggaggtggattcagcagggaggaggaagacatgtctaaccctagcagcagtggtggaggcggcggaggtggaatgaaaaagaggtacaggaccaagttcacgccggagcagaaggagaagatgctggcttttgcagaagagcttggttggagaatccagaagcatcaagaagctgctgttgaacaattctgtgctgaaacttgtgtgaggagaaacgttctcaaggtttggatgcacaataacaagaacacgcttggtaagaaaccctaa

SEQ ID NO: 106 - protein, 270 aa, Lotus corniculatus var. japonicus
  G3670 polypeptide  Orthologous to G2999
MEFDEQEEQDEEMGIPESPPPVPASYDPLLNSAPRSKIAEVSAPVIGRKGGSFTPPVAAGVVRYRECQKNHAVSFGGHAVDGCCEFMAAGDEGTLEAVICAACNCHRNFHRKEIDGETVASCQRQQPPPPPVHHHQYHSQFSPYYHRGPQHHAASGGYLHHHLTTSPTAPHRPLALPPATSGGGFSREEEDMSNPSSSGGGGGGGMKKRYRTKFTPEQKEKMLAFAEELGWRIQKHQEAAVEQFCAETCVRRNVLKVWMHNNKNTLGKKP

SEQ ID NO: 107 - DNA, 1169 bp, Oryza sativa (japonica cultivar-group)
  G3671 Predicted polypeptide sequence is orthologous to G2999
aagtgttttcctagctaggtagctagctagctagacgagcttgccggccggccggccggcgacggcgaccatggacttcgatgaccatgacgacggcgacgaggagatgccgccgatgccggtgagctcgagctacgagactccgccgcagcatggccttgccggcggtgggatggcgcccaagcctcctggtgagattggcagccgtgtgaagggccccagctgcggtggcggcaggtaccgcgagtgcctcaagaaccacgcggttggcatcggcggccacgccgtggacggctgcggcgagttcatggcggccggcgaggagggcaccatcgacgcgctccgctgcgccgcgtgcaactgccaccgcaacttccaccggaaggagtccgagtcgcttgccggcgagggctcgcccttctccccggccgccgtcgtcccctacggcgccacgccgcaccaccagttctccccgtactaccgcacccctgccggttacctccaccaccaccagcaccacatggccgcggcagccgcggccgccgccgccgcagccggcggctacccgcagcggcccctcgcgctcccgtccacctcccacagcggccgcgacgacggcgacgacctgtccgggatggtggggcccatgtcggcggtggggccgctcagcggcatgtccctcggcgccggcccgtccggctccggctccggcaagaagcggttccgcaccaagttcacccaggagcagaaggacaagatgctggcgttcgccgagcgcgtcgggtggcgcatccagaagcacgacgaggccgccgtgcagcagttctgtgacgaggtcggcgtcaagcgccacgtgctcaaggtgtggatgcacaacaacaagcacaccctgggcaagaagctgccatgaccgggagcaaatgcatttgatctcatcgtcggcatgcatgaccaagttgtgggacgacgcatgcatccatgtccatcccaagctagctgagctgatcgaccggccgtggcttagccacccggaccccggtatggtaggtacctgaaccttatttatttagagttggacttaattaattggtggcttaggttaatctgtagcaagagagactgagagagcattcgttctcggctctagtaggtggttctttcttcttttc

SEQ ID NO: 108 - protein, 264 aa, Oryza sativa (japonica cultivar-group)
  G3671 polypeptide  Orthologous to G2999
MPVSSSYETPPQHGLAGGGMAPKPPGEIGSRVKGPSCGGGRYRECLKNHAVGIGGHAVDGCGEFMAAGEEGTIDALRCAACNCHRNFHRKESESLAGEGSPFSPAAVVPYGATPHHQFSPYYRTPAGYLHHHQHHMAAAAAAAAAAAGGYPQRPLALPSTSHSGRDDGDDLSGMVGPMSAVGPLSGMSLGAGPSGSGSGKKRFRTKFTQEQKDKMLAFAERVGWRIQKHDEAAVQQFCDEVGVKRHVLKVWMHNNKHTLGKKLP

SEQ ID NO: 109 - DNA, 1891 bp, Oryza sativa (indica cultivar-group)
  G3674 Predicted polypeptide sequence is orthologous to G2999
aagcttttcttaagctcgccaagaacacacccgagaaatccaaaagggagggaaaagaaagggggtggccggccggtcggtcggtcggcggccatggatttcgacgaccatgacgagggtgacggcgacgaggagatgcctccgatgcctctgagctcgggctacgacgcgccgatgcagcccgggcttggaggtggcggtggcggggtgcccaagccgggaggtggagtcggcggcggcggtggtggtggtggtggtggtggaggaggaggggcgaggtatcgggagtgcctcaagaaccacgccgtcggcatcggcgggcacgccgtggacggctgcggcgagttcatggcttccggcgaggagggctccatcgacgcgctccgctgcgccgcctgcggctgccaccgtaacttccaccgcaaggagtcggagtcccccacgggcgtcgggccggccgagccttccgccgtgtcccccgccgccatctcggcctacggcgcctcgccgcaccaccagttctccccctactaccgcaccccggcagggtacctccaccaccagcagcaccagatggcggccgcggcggcggccgcggccgccgccgcagcgggcggctacccgcagcggcccctcgcgctgccgtccacctcccactcgggacgcgacgagggcgacgacatgtccgggatggtcggccccatggtgattggccccatggtcggcatgtccctcggctccgccggcccctccggctccggctccggcaagaagcggttccgcacaaagttcacgcaggagcagaaggacaagatgctcgccttcgcggagcggctcgggtggcgcatccagaagcacgacgaggccgccgtgcagcagttctgcgaggaggtctgcgtcaagcgccatgtcctcaaggtttggatgcacaacaacaagcacaccctgggcaagaaggcgccatagctaagctaagccaagcaagctcagctcagctcatctcctcccggtgctaggtacctgcactgcaactgcaactgcatgcatcaccatctccatctacttctactacctccttacccgcggctaattagcctttttctttgccttcttttacctcacctgagtagaagcttagctaggttcgtagcgagcaagctgttcttgttggttttaggggaggtggtggttgctgctgctgctgcttttgcatccttccttgtttctttttcgttattttattccattgtggttgggttctttgggcttgtggttgccgtcgttgttgtttcctagtagatgatgacgacgacgtttggtgttgggaaggaagaggacatggatggcgatttgccgatcgatttagatcttgggaatgtagtacttttgtgttgcaattgaaatttccttcctggggatttgggttgctgcacggtttgtttgtttcatcatttcttttcccctatatttcttgtgcttggcacttcatcatcagtagcacttgtagttcgtctagctaacaactagggcagataaagattcagaaaggtcggctgcaactatatgagctgcaacactgttgcattcacatcgatctccctcgcttccaatttccagacctgggcaccaacttgtccatgatccgtccgcttcacctgtctactctgaaattccaatttctctagctaccatgttcgctgcatttttcttccgagttctcgatctcactgtatccgctgcatttactcgtcttccacatctcgcgagcagtgatgccgcattgctgcccatgtgttaggacgcagagcttgcagaagctatagcaatggccggggactttttagaatttagtctatgtgaattcaatgaagcctcgtcctctcttttactc

SEQ ID NO: 110 - protein, 290 aa, Oryza sativa (indica cultivar-group)
  G3674 polypeptide  Orthologous to G2999
MDFDDHDEGDGDEEMPPMPLSSGYDAPMQPGLGGGGGGVPKPGGGVGGGGGGGGGGGGGGARYRECLKNHAVGIGGHAVDGCGEFMASGEEGSIDALRCAACGCHRNFHRKESESPTGVGPAEPSAVSPAAISAYGASPHHQFSPYYRTPAGYLHHQQHQMAAAAAAAAAAAAGGYPQRPLALPSTSHSGRDEGDDMSGMVGPMVIGPMVGMSLGSAGPSGSGSGKKRFRTKFTQEQKDKMLAFAERLGWRIQKHDEAAVQQFCEEVCVKRHVLKVWMHNNKHTLGKKAP

SEQ ID NO: 111 - DNA, 789 bp, Brassica napus
  G3675  Predicted polypeptide sequence is orthologous to G2999
ggtgacgttgaaggattaaaaataaagagggacagagagagagagagataagaaaaatggactttgaggagcaagaagaagaaatggagatgtcaggtgctaaccccaccggaggttacgactctctgagcggcgagggagcgacctcaagcggaggtggtggcggaggaggtagtagaaaaaccgttggagggtcgaaggtaaggtacagagagtgcttaaaaaatcatgccgttaacatcggcggccacgccgtggacggctgctgtgagttcatgccttccggtgaagatggttcactcgacgctctcaagtgtgcagcttgtggctgccaccgcaacttccaccggaaggaaaccgaagtcatgagcggcagggcacacagggttccaacgtactacaaccgtcctcctcagctgccgccgccaggatacctccatttaacgtctccggcggcggcaggacagccttacaagcctcctgcggcctctggggacgaggaggatacgtcgaatccgagcagcagcggcggaacaagggctaagaggtttagaacgaagttcacggcggagcagaaggataagatgttggccttcgcggagaggttgggttggagaattcagaagcatgatgacgcggcggttgagcagttctgtgcggaaactggtgttaggagacaagtgcttaagatttggatgcataacaacaagaactctctgggtaggaaaccctaaaatttcttgtatgatttaagcgcaagagatcatcattgctcctttttctttttgg

SEQ ID NO: 112 - protein, 225 aa, Brassica napus
  G3675 polypeptide  Orthologous to G2999
MDFEEQEEEMEMSGANPTGGYDSLSGEGATSSGGGGGGGSRKTVGGSKVRYRECLKNHAVNIGGHAVDGCCEFMPSGEDGSLDALKCAACGCHRNFHRKETEVMSGRAHRVPTYYNRPPQLPPPGYLHLTSPAAAGQPYKPPAASGDEEDTSNPSSSGGTRAKRFRTKFTAEQKDKMLAFAERLGWRIQKHDDAAVEQFCAETGVRRQVLKIWMHNNKNSLGRKP

SEQ ID NO: 113 - DNA, 1529 bp, Zea mays
  G3680 Predicted polypeptide sequence is orthologous to G2999
ctcgaaggcggccgggctctggccgggccctgacccgtcgtcccatgctaaaagcccagggttaggagctagaggtaatctctctcccccgcggccactccccagtgggcgtgggggcgccgcatggaagccatggacgtcaagtacaagcccgtcatgttccccaacggcgccggcctcaagaagccgaagccggcggcggccgtggcgctggccggggagccgctgtaccgggagtgcctcaagaaccacgccgcgagcctgggcgggcacgccgtcgacggttgcggcgagttcatgccctcgccgggggccaaccccgccgacccgacgtcgctcaagtgcgcggcgtgcgggtgccaccgcaacttccaccgccggacgctggagggttcccctccgccgcccgcgcccgcgccgctggcgctcccgcctccgccgagcgtgatgcacggccagccgcaccgcgcccgggaggagacgcccgaggaccgccacccgggggtcgtcgacgccgacgactccgattccgactcggaaggctcggagtacgacgaggagcggtcggtgtccccgccgccgccgccgcaccacctgctgccggcgccggtggcgcagcagcccccgccaccgtcctacttcccgacggcgccgcacatggtgctctcgctcggttccggcgtgcccgggcccgcggtggcggtatccccggcgcagaggctggccccgacccagctgacgccgtccagcgcgccgccccacgccgggggcgcgatgcccatgcccaggaagcggttccgcaccaagttcaccgccgagcagaagcagcggatgcaggagctgtcggagcggctcgggtggcggctgcagaagcgcgacgaggccatcgtcgacgagtggtgccgcgacatcggcgtcggcaagggcgtcttcaaggtctggatgcacaacaacaagcacaacttcctgggcgggcacagcgcccgccgcagcgcctcctcgcccgcccccgcccccgccgccgcgtcgctccaaaccccagccgccggcgccggcgccggcgctgctgcagcaccgtcattcaacccgtccaggatcacccctccccctcccgtcctcacctcgtccccgacggccgccaccggcttcaacatcaacggcgccgcctcctcggcgcccaccgtcgccaccgactacaccacggacaacgccaacggagcttcgtcgccgcactccgcttgaactagagaagggagaagagaggagggggaagggaagggagagcggagagggagagaaacatgtagcttaatttcagtgatcactcgttttttttttgtttagacctcttgccatctactaagaaattaaccccaagaaaaagcatgccgctgtgcgccatgcctagaaaaccaaaaaaaaaaaacaaaaaaaaaaaaaaaaaaaaaaaaaaaaaaaaaaaaaaaaaaaaaaaaaaaaaaaaaaaaaaaaaaaaaaaaaaaaaaaaaaaaaaaaaaaaaaaaaaaaaa

SEQ ID NO: 114 - protein, 372 aa, Zea mays
  G3680 polypeptide  Orthologous to G2999
MEAMDVKYKPVMFPNGAGLKKPKPAAAVALAGEPLYRECLKNHAASLGGHAVDGCGEFMPSPGANPADPTSLKCAACGCHRNFHRRTLEGSPPPPAPAPLALPPPPSVMHGQPHRAREETPEDRHPGVVDADDSDSDSEGSEYDEERSVSPPPPPHHLLPAPVAQQPPPPSYFPTAPHMVLSLGSGVPGPAVAVSPAQRLAPTQLTPSSAPPHAGGAMPMPRKRFRTKFTAEQKQRMQELSERLGWRLQKRDEAIVDEWCRDIGVGKGVFKVWMHNNKHNFLGGHSARRSASSPAPAPAAASLQTPAAGAGAGAAAAPSFNPSRITPPPPVLTSSPTAATGFNINGAASSAPTVATDYTTDNANGASSPHSA

SEQ ID NO: 115 - DNA, 990 bp, Oryza sativa (japonica cultivar-group)
  G3683 Predicted polypeptide sequence is orthologous to G2999
atggatctttctggggcgcagggcgagctgccgttgccaatgcacgccgcggcgtcgccgtacctcggcttgcaccatgaccaccaccaccatcatggcggcggcggcggcggtggagggatgaatgggcggcacatgtcgccgccgacgccaccggcggcggcggaggagtcgaaggcggtggtggtggtgtcgtcgtcggcgacggcggcggcgaggtacagggagtgcctcaagaaccacgcggcggccatcggcggcagcgccacggacgggtgcggcgagttcatgcccggcggcgaggaaggctcgctcgacgcgctccgctgctccgcctgcggctgccaccgcaacttccaccgcaaggagctcgacgccgccgccgccccgccgctccaccaccaccaccaccaactgctcggcgtcggcgcgcacccccgcggccacggccaccaccaccaccacctcctggtggcggcgctgccgccgccgacgcggatggtgatgccgctgagcgccatgcacacgtcggagtcggacgacgccgcggcgcgccccggcggcggcgcggcggcgaggaagcggttccggaccaagttcacggcggagcagaaggcgcggatgctggggttcgccgaggaggtcgggtggcggctgcagaagctggaggacgccgtcgtgcagcgcttctgccaggaggtcggcgtcaagcgccgcgtcctcaaggtctggatgcacaacaacaagcacaccctcgcccgccgccacctccacccctcccccgccgccgccgccggagacgacgacgacgacggcgcgccgccgccgcaccccgacccccggcggcgcgagctcgccgccgccgccgcaccacctccggctccagtaacccaacacatcaagaaatccgttgacaacaaaagcctcatttctagcttagctgcattgcattgcattgctctactactgttccatcaaattgatgcttaa

SEQ ID NO: 116 - protein, 329 aa, Oryza sativa (japonica cultivar-group)
  G3683 polypeptide  Orthologous to G2999
MDLSGAQGELPLPMHAAASPYLGLHHDHHHHHGGGGGGGGMNGRHMSPPTPPAAAEESKAVVVVSSSATAAARYRECLKNHAAAIGGSATDGCGEFMPGGEEGSLDALRCSACGCHRNFHRKELDAAAAPPLHHHHHQLLGVGAHPRGHGHHHHHLLVAALPPPTRMVMPLSAMHTSESDDAAARPGGGAAARKRFRTKFTAEQKARMLGFAEEVGWRLQKLEDAVVQRFCQEVGVKRRVLKVWMHNNKHTLARRHLHPSPAAAAGDDDDDGAPPPHPDPRRRELAAAAAPPPAPVTQHIKKSVDNKSLISSLAALHCIALLLFHQIDA

SEQ ID NO: 117 - DNA, 1096 bp, Oryza sativa (japonica cultivar-group)
  G3685  Predicted polypeptide sequence is orthologous to G2999
taacccaaagccatccagcactttgcgaggtcgctttcgtttcgcctccttcgtcggccccggaccggaccggacagaggcatgtcctgatggaattcaggggccatgacgaacccgtcgacgagatgggagtcgcgtacggcaggacgccaccctcctcctcctcctcccccgccgcctccgcctccgcggggaacggcgccggcgcggcggaggtgaggtaccacgagtgcctgcgcaaccacgccgcggcgatgggcggccacgtcgtggacggatgcagggagttcatgccgatgccgggggacgccgccgacgccctcaagtgcgccgcctgcggctgccaccgcagcttccaccgcaaggacgacgggcagcagcagcagcagctgcgcctgctcatcccgtccccgcccacgccgcgcgtcccgctgctcatgccgccgccgcagccgcagccgcacccgcacccgcaacacccctacctgcacccgccgttcccgtaccaccacaccccaagcggcagcggcggcacgacgaccgagtcgtccagcgaggagcgggggcctccctcctcgtcggcggcggcggcgcaggggcggcggaagcggttccggaccaagttcacgccggagcagaaggagcagatgctggcgttcgcggagcgggtggggtggcggatgcagaagcaggacgaggcactcgtcgaacagttctgcgcgcaggtcggcgtgcggcgccaggtgttcaaggtgtggatgcacaacaacaagagcagcatcggcagcagcagcggcggcggcagtaggaggcagccgcaggagcaacagtcacaacagcagcagcagcagcagtagccatgggaggagacaagcatttggttaatggtttggtaaatccccacctcattatttttatacgcccaagacatgaggagacgggttaaacaacgcaacggaagtgaggactactctctctgcgatctttatcctctctctctctctctctctctcttcatttggccttaaccttcattctttgtagtcacttatcctcctccataatttggttcttgattctagccttgtccaatttg

SEQ ID NO: 118 - protein, 255 aa, Oryza sativa (japonica cultivar-group)
  G3685 polypeptide  Orthologous to G2999
MEFRGHDEPVDEMGVAYGRTPPSSSSSPAASASAGNGAGAAEVRYHECLRNHAAAMGGHVVDGCREFMPMPGDAADALKCAACGCHRSFHRKDDGQQQQQLRLLIPSPPTPRVPLLMPPPQPQPHPHPQHPYLHPPFPYHHTPSGSGGTTTESSSEERGPPSSSAAAAQGRRKRFRTKFTPEQKEQMLAFAERVGWRMQKQDEALVEQFCAQVGVRRQVFKVWMHNNKSSIGSSSGGGSRRQPQEQQSQQQQQQQ

SEQ ID NO: 119 - DNA, 699 bp, Oryza sativa (indica cultivar-group)
  G3686  Predicted polypeptide sequence is orthologous to G2999
atggagctcagcgagcacgaggaggacgccggcgacgtgggcggtggctgctcatccccgcccacgccgcctcaccgcgtgctgacgtcggccgcccccgagacgatcaggtgccggtaccacgagtgcctccggaaccacgcggcggcctcgggcggccacgtcgtggatggctgcggcgagttcatgccggcgtccaccgaggagccgctcgcctgcgcggcctgcggctgccaccgcagcttccaccgccgggacccttccccgggccgcgcgggcgcagcacggctgctgcagctgcacctgccggcgtccatcaactcgcgcgcaccacccgcgctgctgctgccgcctgcagcggccgccagcaagcaaggtttgccgttccctggctacggcacgcccagcggcggcactggcaccacgaccgcgtcctccagcgacgagcggctgcggccctcgccggtgcagccacggaggcggtcacgcacgacgttcacgcgggagcagaaggagcagatgctggcgttcgcggagcgcgtggggtggaggatccagcggcaggaggaggcgacggtggagcacttctgcgcgcaggtcggcgtccggaggcaagcgctcaaggtgtggatgcacaacaacaagcatagcttcaagcagaaacagcagcaggagaacaggcaggaacagcagcagtag

SEQ ID NO: 120 - protein, 232 aa, Oryza sativa (indica cultivar-group)
  G3686 polypeptide  Orthologous to G2999
MELSEHEEDAGDVGGGCSSPPTPPHRVLTSAAPETIRCRYHECLRNHAAASGGHVVDGCGEFMPASTEEPLACAACGCHRSFHRRDPSPGRAGAARLLQLHLPASINSRAPPALLLPPAAAASKQGLPFPGYGTPSGGTGTTTASSSDERLRPSPVQPRRRSRTTFTREQKEQMLAFAERVGWRIQRQEEATVEHFCAQVGVRRQALKVWMHNNKHSFKQKQQQENRQEQQQ

SEQ ID NO: 121 - DNA, 1284 bp, Oryza sativa (japonica cultivar-group)
  G3690 Predicted polypeptide sequence is orthologous to G2999
atggagtacaagagatcatcgcatgtggaggaggaggaagaggaggaagaagaggaggacgacgaggaggaagacgaggaggagcaaggtcaccatcagtacacgacggcggcggcgcagcagcagctgcacccgcaggttcttggctcgtcggcttcctcgccgtcgtcgttgatggactccgccgctttctcgaggcccctcctgcctcccaacctgtcgctcgtgtcgccgtcggcggcggcggcggcggcgcccggtggatcctacctgcatgcggctcaccaccatgggcagggaagaagggtggaggcgcctggtggggagagccagcaccatctccagcgccatcatgagccggcgagaaatggcgttcttggcggcgtcgccggtgctcacgcggcgtctacgcttgccctcgtgggtggtggtggtggtggtccgagaggcggcgagggggcggcgggcgaggcgccgacgtggaggtacagggagtgcctcaagaaccacgcggcgcggatgggcgcgcacgtgctcgacggctgcggcgagttcatgtcgtcccctggcgacggcgccgcggcgctggcctgcgccgcgtgcggctgccaccgtagcttccaccgccgcgagccggcggtcgtcgcgccggcctcgctctcgctctgccccgcctccgcctccgcctccgccgccgccggcctggtgtccctatccccctccgcgacgcccaccggcgccaactcctcccggctcatgccgctcctcctcgccccgccgcacatgcagaagcgcccgcccgtcctccccgtgtccccggcgtctgcgcccgccgcgctggccgagtcgtcaagcgaggagctgcgcccgccgccgctcccctcttcccacccccacgcgcacgcggccgccgtggtggcggcgtcggcctccgcgccgccggggccgagcaagaagcgcttccggaccaagttcacggcggagcagaaggagcggatgcgtgaattcgcgcaccgcgtcgggtggcgcatccacaagcccgacgccgccgccgtcgacgcgttctgcgcccaggtcggcgtctcccgccgcgtcctcaaggtgtggatgcacaacaacaaacacctcgccaagacgcccccgtcgccgacatcgcagccgccgccgccgccgctccaccacgatccttctcctcctccccctcctcaccaccaccaccaccaccatcaccaccaccacccaccacaacaccatcagcagcagcagcagcagcatgatgcatga

SEQ ID NO: 122 - protein, 427 aa, Oryza sativa (japonica cultivar-group)
  G3690 polypeptide  Orthologous to G2999
MEYKRSSHVEEEEEEEEEEDDEEEDEEEQGHHQYTTAAAQQQLHPQVLGSSASSPSSLMDSAAFSRPLLPPNLSLVSPSAAAAAAPGGSYLHAAHHHGQGRRVEAPGGESQHHLQRHHEPARNGVLGGVAGAHAASTLALVGGGGGGPRGGEGAAGEAPTWRYRECLKNHAARMGAHVLDGCGEFMSSPGDGAAALACAACGCHRSFHRREPAVVAPASLSLCPASASASAAAGLVSLSPSATPTGANSSRLMPLLLAPPHMQKRPPVLPVSPASAPAALAESSSEELRPPPLPSSHPHAHAAAVVAASASAPPGPSKKRFRTKFTAEQKERMREFAHRVGWRIHKPDAAAVDAFCAQVGVSRRVLKVWMHNNKHLAKTPPSPTSQPPPPPLHHDPSPPPPPHHHHHHHHHHHPPQHHQQQQQQHDA

SEQ ID NO: 123 - DNA, 717 bp, Oryza sativa (japonica cultivar-group)
  G3692 Predicted polypeptide sequence is orthologous to G2999
atggagcagcagcaggagcggccgcgggaggtgtacagggagtgcatgcgcaaccacgcggcgaagctggggacctacgcgaacgacggctgctgcgagtacacccccgacgacggccacccggcgggcctgctctgcgcggcgtgcggctgccaccgcaacttccaccggaaggacttcctcgacggccgcgccaccgccgccgccggaggggcgggaggcgccggcgtcggcgtcgcgccaatgctgccggcccccggtggaggcgggccgccgggatacatgcacatggcggcgatgggaggagcggtgggcggcggcggcggcgtcgacggcggcggcggctccggggggaggcggcggacgcggaccaagttcacggaggagcagaaggcgcggatgctgcggttcgcggagcggctcgggtggcggatgccgaagcgggagcccggccgcgcgcccggggacgacgaggtggcgcgcttctgccgggagatcggcgtcaaccggcaggtcttcaaggtgtggatgcacaaccacaaggccggcggcggcggcggcggcggcggcagcggcggccccggcgccggtggaggcgcccagacgtcgtcgtcgacgaccaggggcggcggcgacgtcggggtgggcttgtcgccggcgatgggcggcgacggcgaggacgacgaggaggtgagggggagcgagatgtgcatgtag

SEQ ID NO: 124 - protein, 238 aa, Oryza sativa (japonica cultivar-group)
  G3692 polypeptide  Orthologous to G2999
MEQQQERPREVYRECMRNHAAKLGTYANDGCCEYTPDDGHPAGLLCAACGCHRNFHRKDFLDGRATAAAGGAGGAGVGVAPMLPAPGGGGPPGYMHMAAMGGAVGGGGGVDGGGGSGGRRRTRTKFTEEQKARMLRFAERLGWRMPKREPGRAPGDDEVARFCREIGVNRQVFKVWMHNHKAGGGGGGGGSGGPGAGGGAQTSSSTTRGGGDVGVGLSPAMGGDGEDDEEVRGSEMCM

SEQ ID NO: 125 - DNA, 765 bp, Oryza sativa (japonica cultivar-group)
  G3694 Predicted polypeptide sequence is orthologous to G2999
atgggcgcgcacgtgctcgacggctgcggcgagttcatgtcgtcccctggcgacggcgccgcggcgctggcctgcgccgcgtgcggctgccaccgtagcttccaccgccgcgagccggcggtcgtcgcgccggcctcgctctcgctctgccccgcctccgcctccgcctccgccgccgccggcctggtgtccctatccccctccgcgacgcccaccggcgccaactcctcccggctcatgccgctcctcctcgccccgccgcacatgcagaagcgcccgcccgtcctccccgtgtccccggcgtctgcgcccgccgcgctggccgagtcgtcaagcgaggagctgcgcccgccgccgctcccctcttcccacccccacgcgcacgcggccgccgtggtggcggcgtcggcctccgcgccgccggggccgagcaagaagcgcttccggaccaagttcacggcggagcagaaggagcggatgcgtgaattcgcgcaccgcgtcgggtggcgcatccacaagcccgacgccgccgccgtcgacgcgttctgcgcccaggtcggcgtctcccgccgcgtcctcaaggtgtggatgcacaacaacaaactcctcgccaagacgcccccgtcgcagacatggcagccgccgccgccgccgctccaccacgatccttctcctcctccccctcctcaccaccaccaccaccaccatcaccaccaccacccaccacaacaccatcagcagcagcagcagcagcatgatgcatga

SEQ ID NO: 126 - protein, 254 aa, Oryza sativa (japonica cultivar-group)
  G3694 polypeptide  Orthologous to G2999
MGAHVLDGCGEFMSSPGDGAAALACAACGCHRSFHRREPAVVAPASLSLCPASASASAAAGLVSLSPSATPTGANSSRLMPLLLAPPHMQKRPPVLPVSPASAPAALAESSSEELRPPPLPSSHPHAHAAAVVAASASAPPGPSKKRFRTKFTAEQKERMREFAHRVGWRIHKPDAAAVDAFCAQVGVSRRVLKVWMHNNKLLAKTPPSQTWQPPPPPLHHDPSPPPPPHHHHHHHHHHHPPQHHQQQQQQHDA

SEQ ID NO: 127 - DNA, 855 bp, Oryza sativa (japonica cultivar-group)
  G3695  Predicted polypeptide sequence is orthologous to G2999
atgatggatcacctgagcctggtgccctacgagggcggcagcgccggcgggggaggaggtggagggaagtacaaggagtgcatgcggaaccacgcggcggcgatgggcgggcaggcgttcgacgggtgcggggagtacatgccggcgtcgcccgactcgctcaagtgcgccgcgtgcggctgccaccgcagcttccaccgccgcgccgccgcgggcatcggcggcgggccggtgttcttccgcccgccgccaccgccgcagccgcactcgcaccacgccgcgctgcagggcttcctcccgtcgtccgtgccggcgccggcgccgccgccgcagctcgcgctgccgtaccacgccgtgcccgccgcggcgtggcaccacgcggcggcggcggcggcaggccgcgccggctcggagacgcccccgcggatggacgacttcggccccggcagcgccggcgggagcgggagcggcggcggcggcatcttcgggcggaagcggttccggaccaagttcacgccggagcagaaggagcggatgcgggagttcgccgagaagcaagggtggcgcatcaaccgcaacgacgacggcgccctggaccgcttctgcgtcgagatcggcgtcaagcgccacgtcctcaaggtctggatgcacaaccacaagaaccagctcgcctcctccccgacctccgccgccgccgccgccgccggcgtcatgaaccccggcgccggcatcggcctcggcaccggcctcggcaccggcatcagcggcgacggcgacggcgacgacgacgacaccgacgactccccgccccgcgccgccgtgtcctccccctccccttcaccgatcagcgtctag

SEQ ID NO: 128 - protein, 284 aa, Oryza sativa (japonica cultivar-group)
  G3695 polypeptide  Orthologous to G2999
MMDHLSLVPYEGGSAGGGGGGGKYKECMRNHAAAMGGQAFDGCGEYMPASPDSLKCAACGCHRSFHRRAAAGIGGGPVFFRPPPPPQPHSHHAALQGFLPSSVPAPAPPPQLALPYHAVPAAAWHHAAAAAAGRAGSETPPRMDDFGPGSAGGSGSGGGGIFGRKRFRTKFTPEQKERMREFAEKQGWRINRNDDGALDRFCVEIGVKRHVLKVWMHNHKNQLASSPTSAAAAAAGVMNPGAGIGLGTGLGTGISGDGDGDDDDTDDSPPRAAVSSPSPSPISV

SEQ ID NO: 129 - DNA, 999 bp, Zea mays
  G3719 Predicted polypeptide sequence is orthologous to G1274
ctgccggcgcgtgcgtctacttactcaggcggcctcgctaggactcgcccacgagacgagctacgccgcctactacccgccgcccgcgcccgcctcctcgtacttcccaccaccacccgacctcgtggcggacctcccgccgcccgccgccgccaccatggccgatgactacttccagttcgggttcaccggccaggagatggtggccgatgactgctcggcgccggtgttcgccaacagttcttcagacgccgtcaccgccgccgtcggcaatggcatgagcctgctgagctacggcgtggacggcgacggcgacgggaggaggccgatgagcggaccaccatatggcaccggtgggaacggcggcggccggccgccgtcgtcgtcacggatcgggttccggacgcggtcggaggtggacgtgctggacgatggcttcaagtggcgcaagtacggcaagaaggcggtcaagagcagccccaacccgaggaactactaccggtgctcgacggagggctccggcgtgaagaagcgcgtggagcgggacagcgacgacccgcgctacgtcgtcaccacctacgacggcgtccacaaccacgccgcgccgggcccgggcgccgcctcctacctgtgccaaccaccgccgccgcgcggcgcaaccgcgaccgcaacgcccttctcgcctccacgctcggcctcggcgccagcgcctctggctgcagcgcccagctggagcgccgcctgtgacgcgtggtgggaggcgcagctgcacgccgcggcggcggttgctcattcctcggagtcgtcgtactgatccgatccgtcatccatcagttattacacgcacgtacgggtcacgtagctagaatgtgttggaactctaaaacgctcacaagcacaggacacagattggtgagaggaggaagacgaatgaacagtagctaaacccaaagagttgggcgcccaaacacctgcagcgctccgaccctgcctttctct

SEQ ID NO: 130 - protein, 218 aa, Zea mays
  G3719 polypeptide  Orthologous to G1274
MADDYFQFGFTGQEMVADDCSAPVFANSSSDAVTAAVGNGMSLLSYGVDGDGDGRRPMSGPPYGTGGNGGGRPPSSSRIGFRTRSEVDVLDDGFKWRKYGKKAVKSSPNPRNYYRCSTEGSGVKKRVERDSDDPRYVVTTYDGVHNHAAPGPGAASYLCQPPPPRGATATATPFSPPRSASAPAPLAAAPSWSAACDAWWEAQLHAAAAVAHSSESSY

SEQ ID NO: 131 - DNA, 666 bp, Zea mays
  G3720  Predicted polypeptide sequence is orthologous to G1274
atggcggcagtcggagctcacccagtgctgtaccaccacccggcgccggcgggcgacgcctcctccatgtcctcctacttctcccacggaggcagctccaccacctccagctctgcgtccagcttcaccgccgcgctcgcgccgacgacgacggcgctcgccgagcatttcgacatctccgagttcctcttcgacgacgctgcgggcgctggggtcgccggcgcgccaggtgtgttcgccgatggcgcggcccgccccgtcgtcctgccggtgccggatgccgctggtggtggtgcaattatcggcgcagccgctgggggcgcggctgcggcgtcggaggtgccagagcggccgcggacgacgcggatcgcgttccggacgaggtcggagatcgagatcctggacgacggctacaagtggaggaagtacggcaagaagtccgtcaagaacagccccaacccaaggaactactaccggtgctcgacggaagggtgcaacgtgaagaagcgggtggagcgggacaaggacgaccccagctacgtggtgacgacgtacgaggggatgcacaaccacgtcagccccagtacggtgtactacgccagccaggacgccgcctccggccgcttcttcgtcgccggcacgcagccaccgggctccctcaactga

SEQ ID NO: 132 - protein, 221 aa, Zea mays
  G3720 polypeptide  Orthologous to G1274
MAAVGAHPVLYHHPAPAGDASSMSSYFSHGGSSTTSSSASSFTAALAPTTTALAEHFDISEFLFDDAAGAGVAGAPGVFADGAARPVVLPVPDAAGGGAIIGAAAGGAAAASEVPERPRTTRIAFRTRSEIEILDDGYKWRKYGKKSVKNSPNPRNYYRCSTEGCNVKKRVERDKDDPSYVVTTYEGMHNHVSPSTVYYASQDAASGRFFVAGTQPPGSLN

SEQ ID NO: 133 - DNA, 825 bp, Oryza sativa (japonica cultivar-group)
  G3721  Predicted polypeptide sequence is orthologous to G1274
agtggatcccccgggctggaggaaaattcaccggtgaaaaggttcagcactgtgcaatggcggcttccgtaggactgaaccctgaagctttcttcttcagcaactcctactcctactcctcatcccctttcatggccagctacacgccggagttctcggccgccgctatcgacgccaacttattctccggcgagctcgatttcgactgctctctcccagctccggcccaggagtacccggaaaatgaaaacactatgatgaggtacgagagcgaggagaagatgagggcgagggtgaacgggaggatcgggttcaggacgaggtcggaggtggagattcttgatgatggcttcaagtggaggaagtacggcaagaaagctgtcaagaacagcccaaatccaagaaactactaccggtgctcgacggaggggtgcaacgtgaagaagcgagtggagagagaccgggaggaccaccgctacgtcatcaccacctacgacggcgtccacaaccacgcgagccccgccgccgccgccgcggcgctgcagtacgccgccgccgccggcgactactacagcccgccgctcagcagcgccggctcgccgccggccgcctatttcggcaggcggcttcgctgctcttctgagggctgatgaagtttgtctaggactagacacgcccgggagctctagctaggatagaaaactagagaaagtttaattatacctgaattttaattaatcacctcacaaaactctgatgtatcatattatatcgtgatagtgactggttgttaatttaattttggcgatcgatgtgatcttcggt

SEQ ID NO: 134 - protein, 197 aa, Oryza sativa (japonica cultivar-group)
  G3721 polypeptide  Orthologous to G1274
MAASVGLNPEAFFFSNSYSYSSSPFMASYTPEFSAAAIDANLFSGELDFDCSLPAPAQEYPENENTMMRYESEEKMRARVNGRIGFRTRSEVEILDDGFKWRKYGKKAVKNSPNPRNYYRCSTEGCNVKKRVERDREDHRYVITTYDGVHNHASPAAAAAALQYAAAAGDYYSPPLSSAGSPPAAYFGRRLRCSSEG

SEQ ID NO: 135 - DNA, 834 bp, Zea mays
  G3722  Predicted polypeptide sequence is orthologous to G1274
cattgggtacctcgaggccggccgggaagttacttgcagctggccatgcacatggcgctatcgtcccgcagctcattcgccgccgacgtcctcctcccagccaccatgtcgtatcgtcagccgtgcagcggtgcttccagctacttgggctctcagcccgcggcccctttcccgtcggcagcgttcggcgcggtggcgcagctggacgtcttcgactgcctgtcgtcggacgaaggcgttggcgtcccggcagctgtacctggtgcgttcgcgccgccgccgccgcttatgccggccgagcgcgtcgtcccggacgctgctgcaggctacagtagtcatactaggagtgcagcggctgtggcgggtgaggggtcgaggactacgcacagaattgcgttccgagtgaggtcggacgaggacgaggtactcgacgacggctacaaatggaggaagtacggaaagaagtccgtcaagaacagccctaatccgaggaactactaccggtgctcgacggagggctgcaacgtcaagaaaagggtggagcgagacagggacgacccgagatacgttgtgaccatgtacgagggagtgcacaaccatgtgagtcctggtaccgtctattacgccacccacgacgccgcctccggccgcttcttcgtcgccgggatgcatcagccaggccattgatcaacgagcagatcagagagcgtcttaattagtgtaagatatgtataccgactatctgttttaggccttgttcatgttttaggtcttgtccagttattccaaatcatatagattggaatgtattgaaatgaattgagatagatttag

SEQ ID NO: 136 - protein, 213 aa, Zea mays
  G3722 polypeptide  Orthologous to G1274
MHMALSSRSSFAADVLLPATMSYRQPCSGASSYLGSQPAAPFPSAAFGAVAQLDVFDCLSSDEGVGVPAAVPGAFAPPPPLMPAERVVPDAAAGYSSHTRSAAAVAGEGSRTTHRIAFRVRSDEDEVLDDGYKWRKYGKKSVKNSPNPRNYYRCSTEGCNVKKRVERDRDDPRYVVTMYEGVHNHVSPGTVYYATHDAASGRFFVAGMHQPGH

SEQ ID NO: 137 - DNA, 1235 bp, Glycine max
  G3723  Predicted polypeptide sequence is orthologous to G1274
gtcttgacggtcccattttcaccccattgtgcaaattgaaagtagtagggaacccctactatagctactacatcatcacaatgacgtcaccttaacgtctctcgtgttgacacgtagctcagtgaggctatttcgctgcatcctccaagaaggtgtttggaaggatccttcccaccccatgccaaaagcaagcatattaattaaaaaaaatagaaaaaaataaaacacaattttattttattataggatatttattagttatttattggatataagtggcagcatgctttagtcctaggcgtgataaaaggccaaagactcttaggtttttggctctttgcagaatctttgagtgacacatacctagctatcacctcaatggattactattttggaaaccttaatcctaacccttattaccatcactctgccgtagtgaacatggcatctccctcctccgagttcatgttatctgattatctcgtgttggaagatgctcttgttgttgatcatcatcaagagtcttggtcacaaagcactgaaactgaatcatcggagaaagcaacctccagcgatgcaagtcatgggttcggtgatgcaacctccaccaacaccaacatgcatataaagtgccaaaatagtgggattaagggaaagaatgcagaagtgagtcaaaggatcacgtttagaaccagatcgcaacttgaggttatggatgatggatataaatggaggaaatacgggaagaaaacagtgaagagcagtcccaacccacggaactactacaagtgttcaggtgaaggatgcgatgtgaagaaaagggtggaaagggatagggatgactccaactatgtgttaacaacgtacgacggtgtccacaatcatcagaccccgtctactgcctactacagccaaatgcccttgctgcattctaatcatgattgggccctccacccttctgcaaactcataatatcctccttaatatagtaatatccagagataggagaatcaacttatacttttaggattactttttatctttattatttattttttataagagattttaaaaaataaataatgagaatagagaataattttaaaagaattattgttgatgtaagttaatctctactctgtatatatatatagttattgactcatttagtatattgcctgtcaataaccattattacatgtatattgattattatgcaggttcccctccacgct

SEQ ID NO: 138 - protein, 197 aa, Glycine max
  G3723 polypeptide  Orthologous to G1274
MDYYFGNLNPNPYYHHSAVVNMASPSSEFMLSDYLVLEDALVVDHHQESWSQSTETESSEKATSSDASHGFGDATSTNTNMHIKCQNSGIKGKNAEVSQRITFRTRSQLEVMDDGYKWRKYGKKTVKSSPNPRNYYKCSGEGCDVKKRVERDRDDSNYVLTTYDGVHNHQTPSTAYYSQMPLLHSNHDWALHPSANS

SEQ ID NO: 139 - DNA, 974 bp, Glycine max
  G3724  Predicted polypeptide sequence is orthologous to G1274
tcagaattctgctcgttgctctacgcaccatagtctttgttttcatttactaccatatttagttatcagcaatggacttctactttggaaactctcctccttatcccaataattatgctcataattctcttaatatggctctatcttcccctgagattgcactatccgattatctcatgctcgatgactatgttgatcatcaagattctcgatcatcacaaagcaccgagtcatctgaaaaagcaaccttcaatgatgccactcacggattcagtactggtgcaacctctaagaataataacataaactgcaaaaatgggattaatgaaaacaaaggtggagtgggtccaaggatcgcgtttagaaccaaatcagagcttgagatcatggatgatggatacaagtggaggaagtacggcaagaagtccgtgaagagcagtcccaatctaaggaactactacaaatgttcaagtggaggatgcagtgtgaagaaaagggtggaaagggatagagatgactacagctacgtgataacaacatatgaaggtgtgcacaatcatgagagcccatttaccacatactacagccccatctccttcgtacattctgatactactttcaaatgacaccaacttcaaacccttttgggcatttacacctccctagcttaattatgtgccaagaaaaagcttggaagattcgatcgagcaggggaagctatgtatcattgcattgtctaatcaatcataatttattttcatgctgtaataggttgaagagagtttctatacctttttttggttccacgtttaatatatctctcaattaaaaatcagcctttgctagttcatgtaacaaggaacatgattctccatgtgtaaagttgttcaaatcttaaaagtaagtatcttgtattaggattagagtatctctcttgtactctgtttaataataaaagttttgcctcctaaaaa

SEQ ID NO: 140 - protein, 184 aa, Glycine max
  G3724 polypeptide  Orthologous to G1274
MDFYFGNSPPYPNNYAHNSLNMALSSPEIALSDYLMLDDYVDHQDSRSSQSTESSEKATFNDATHGFSTGATSKNNNINCKNGINENKGGVGPRIAFRTKSELEIMDDGYKWRKYGKKSVKSSPNLRNYYKCSSGGCSVKKRVERDRDDYSYVITTYEGVHNHESPFTTYYSPISFVHSDTTFK

SEQ ID NO: 141 - DNA, 1369 bp, Oryza sativa (japonica cultivar-group)
  G3725  Predicted polypeptide sequence is orthologous to G1274
atgggcttcgccaaaacaacaaccgaaacggatatcaaattgtttcttatggggccgtgcggggcatcaaagcaaaacaattcgaaacggggcggctcgcgcacggtcgcgcgcgccgaagcttcatccaacgactcgagccaggaagctcgacggctcttcggcgcgtgtcacgtaagagagtcggccaacccacatgcacgtgtaccgatgtacatggcggcggcggctgcgggagcaagcacacccttcaatttttgccgccacggctcgcacgccgagtacgacgccgtcttcagcggcagctggatggcgcgccgcccctccgcggcgccgcacggtggcggcgcctccggctccggctccggcagcggctacggcgccgcctcgtacgttgctcccaccttcggcgcggcgtttaggcagcagcatctcgacctcctcgactacctgtccgacgatcagggcgttccggcgccaccaccagcggctgtgcccagcgcgtcgtacgtgacgccggcgccggcgatggcccccgctgaaccggtcgtgccggatgctgttgccgccgccggcggctatccgaggagcgtggctgcggcggcggcggccgtggccggcgagggaagagatcggacgacgacggacaagatcgcattccggacgaggtcggacgatgagatactcgacgacgggtataagtggaggaagtacgggaaaaagtccgttaagaacagccctaatccgaggaactactaccggtgctcgacggaggggtgcaacgtgaagaagagggtggagagagacaagaacgacccgcggtacgtggtgacgatgtacgaggggatccacaaccacgtgtgccccggcactgtctactacgccgcgcaggacgccgcctccggccgctttttcgtcgccgggatcagtcacccagaccttaattaagctaggatatgctttgccggcccagctgtggcttagcttgatgtgcagctctagttattgtatgggctgtacggttcagttatttgaagcgggttatacttatatgttgttaatgtttgcctactgattttaattaatttcttagagttagactcaatttggcggagggattcccttcaaaaaaagaaatcccttcaaaaaatttggcggagggacgactgatatatatggtgacattagctaggtttgctcacttttggcaaaaataacaagtttcctttcgtgccactctccgtccctaggtcagtgtttggcaaaacgcccaaaaaaatgtccgtgttgccaattaatttgtcgattgtgtacttcaatttcaagccaaatttcggcaaagctagtactttgtgtgttttagatgttg

SEQ ID NO: 142 - protein, 243 aa, Oryza sativa (japonica cultivar-group)
  G3725 polypeptide  Orthologous to G1274
MAAAAAGASTPFNFCRHGSHAEYDAVFSGSWMARRPSAAPHGGGASGSGSGSGYGAASYVAPTFGAAFRQQHLDLLDYLSDDQGVPAPPPAAVPSASYVTPAPAMAPAEPVVPDAVAAAGGYPRSVAAAAAAVAGEGRDRTTTDKIAFRTRSDDEILDDGYKWRKYGKKSVKNSPNPRNYYRCSTEGCNVKKRVERDKNDPRYVVTMYEGIHNHVCPGTVYYAAQDAASGRFFVAGISHPDLN

SEQ ID NO: 143 - DNA, 766 bp, Oryza sativa (japonica cultivar-group)
  G3726 Predicted polypeptide sequence is orthologous to G1274
gatttagcgccaatccttataaatacggagctttcgcgccggcctcgtactcggccatggcggcagtcggcgcgcacgcagcggtctaccaccacccggtctcgggcctctcggcgccggcgggcgacgccgcctactcgatgtcatcgtacttctcccacgggggaagctcgacctccagctccgcgtccagcttctccgccgccctcgccgccgcaacgacgccgccgcttcccgacccgtcggggtcgcagttcgacatctccgagttcttcttcgacgacgcgcctccggccgccgtgttcaatggcgcgcccaccgccgcgctgccggatggcgccgccgcaaacgcaacaaggagcgcggcggaggcggtgccggcgccggcgccggcggccgtggagaggccgcggacggagcggatcgcgttccggacgaagtcagagatcgagattcttgacgacggctacaagtggcgcaagtacggcaagaagtccgtcaagaacagccccaacccaaggaactactaccggtgctcgacggaagggtgcaacgtgaagaagagggtggagcgggacaaggacgacccgagctacgtggtgacgacgtacgaggggacgcacaaccacgtgagccccagcacggtgtactacgccagccaggacgccgcctccggccgcttcttcgtcgccggcacgcagccgccaggttctctcaattaaccgcgcgcgtacggttaatttgatcgatcgggtcagccatggga

SEQ ID NO: 144 - protein, 221 aa, Oryza sativa (japonica cultivar-group)
  G3726 polypeptide Orthologous to G1274
MAAVGAHAAVYHHPVSGLSAPAGDAAYSMSSYFSHGGSSTSSSASSFSAALAAATTPPLPDPSGSQFDISEFFFDDAPPAAVFNGAPTAALPDGAAANATRSAAEAVPAPAPAAVERPRTERIAFRTKSEIEILDDGYKWRKYGKKSVKNSPNPRNYYRCSTEGCNVKKRVERDKDDPSYVVTTYEGTHNHVSPSTVYYASQDAASGRFFVAGTQPPGSLN

SEQ ID NO: 145 - DNA, 1696 bp, Zea mays
  G3727 Predicted polypeptide sequence is orthologous to G1274
cggacggcacatcaacggacagacacacacaagcaaggcggctagcggtgcaagtagtgcgaagctagctaggtgctggtgcatgcaatggcggcttcgctgggtctgaaccctgaagctgtcttcacttcctacacctcctcgccgccgttcatgtcggactacgtggcggcgagcttcctgccgccggccgtcgtcgactccacggacttctctgcagagctcgatgatcttcaccaccacttggattactcatcgccggcgccgaccttggccggggctcggagcgatcgcagcgagaagcagatgatcaggtggtgtgagggtggtggtggcgagaagagactcggtaggatcgggttcagaacgagatcagaggtggagatcttggacgatggattcaaatggaggaagtatggcaagaaggctgtcaagagtagcccaaatccaaggaactactaccgctgctcgtcggagggctgcggcgtgaagaagcgggtggagagggaccgcgacgacccccgctacgtcatcaccacctacgacggcgtccacaaccacgcaagccccgcagccgccgccatcatccagtacggcggcggcggcggattctatagcccgccgcacagcggctcgccgtcggccgcctcctactcgggctccttcgtcctctgacttctccgggccttgacccagagtgatctgatctacctgctttatcccagtcgtaggatgagaagagtgttcagacttcagagacatcagttcagcggccggctaaattcggacctgattgtagatatttacacctcaattattggttacctcttgtgacgactgacgaggcatcataatcgtcactaggataattgatcacgcatgtttttcgcttaattagtttctgtgtatacatacgaagtttgccgtatagctgataggctgctgatttaacttgacttctctttgttcggtattagaccccaagatcaacatttacgctgaacagatgctttgtaacagtgaaggaatattttatggtttttccagatatatgccattatgaaaataaaaaaaaaaaaaaaaaaagcggccgcttggtttgtctctttgttggcattccttgcaacaaattattaattctccacggtacagaacgggacatcatcacaatgtcagtgcgcaaccataactgaactgcaacaatgaagaacaggtagcaaaccttatttcgagcaaacagtcagctcagcttagaaactaactaaaaagagcacggcactcattggcctcattagccatctcttccatgctcctatctttcctctcaatgtccaggtcaagcttctccttcaattctttctccttcacatcaatcgcatcatatatttcatcatttttctcaaaatcccctttcttccttgggatgaggtggatgtggacatgcgcaactgtttggccagcttgaggaccatcctggatagcaaaggtaagtgacgatgctttgtggtactgctcaagacgtgcaccaacttcctttgcagtaacccataagtcactaatctcatcagaacttagatcggcgaatcttttcacttcacgcttggggcacacaagaacatgtaggtattgtcaaggaaaaaccagtgcatatagaagaacacagtttcctaaaacatgatgtatcaaactttgagtc

SEQ ID NO: 146 - protein, 195 aa, Zea mays
  G3727 polypeptide  Orthologous to G1274
MAASLGLNPEAVFTSYTSSPPFMSDYVAASFLPPAVVDSTDFSAELDDLHHHLDYSSPAPTLAGARSDRSEKQMIRWCEGGGGEKRLGRIGFRTRSEVEILDDGFKWRKYGKKAVKSSPNPRNYYRCSSEGCGVKKRVERDRDDPRYVITTYDGVHNHASPAAAAIIQYGGGGGFYSPPHSGSPSAASYSGSFVL

SEQ ID NO: 147 - DNA, 1663 bp, Zea mays
  G3728 Predicted polypeptide sequence is orthologous to G1274
cattgggaccctcgaggccggccgggtctaattatatgataggtgtcaagtggaagtgcagtgatgtatgcagctgaggcatcctaacagaccccggccgacgggaaacaagaaagaaaaaatcgagaggacgccagggccgattctctgcgtgacttggggcgtcgtcgccgagttttctccggccgagggcggcgcgaccggacaaccagcgtgagcgcgaccggcgacatgactcgcggcaaccagcgtgaccgcgaccgtgagcgcgcggcggcgcggaagcccaacgccaagaactcccaggacgggctcaccccggagcagcgccgcgagagggacaagaaagctctggaggagaaggcggccaagaaggcgcagcaggcagcggccggcggcaccgggacctccacggacaacaacaagaacaaggcaggtggcaagaagtaggaggcagtggcgcgccgccacctctgtacgattaatcgatgccttgagcttgtaacttgttcgcatccttgtaggtgcgatgcttgttgggtcataaactctgatgatatcgagatttggtgatcagaaataatgcgtggttttcgcgcccaaaattgggaaccccgaggccggccggggttattcaggcaggcgcattgactgatacacatatatacaacaagcaaggcggctagctacagcggctagtgcgcgcgtggtgcaggcgcatctagctactacctggtgcttgttgtgcatacaatggcgacttcgctgggactgaaccctgaagatctcttcacttcgtactcgtcttcctactactcctcgccgccgttcatgtccgactacgcggcgagcttcacgccggcggccggggactccacggccttctcctcggagctcgacgaccttcaccacttcgactactcaccggcgccgatcgtcactgctgccggagccggggctgggggcggcgatcgcaacgagaagatgatgtggtgtgagggtggtggtgacgagagaagactcagaagcaacggaaggatcgggttcagaacgaggtcagaggtggagatcttggacgacggattcaagtggaggaagtacgggaagaaggccgtcaagaacagcccaaatccaaggaactactaccgctgctcgtcggagggctgcggcgtgaagaagcgggtggagagggaccgcgacgacccccgctacgtcatcaccacctacgacggcgtccacaaccacgccagccccggagccgctgctatcatcgtcccgtacggcagcggcggcggcaatagcggcttctacagcccgccgcacagcggctccccgtcggccacctcctactcgggctccctagccttctgacttttccgggccttgacccatagttacctttacactccagtcgtcggataagaagaatgttcagcggctggctaaacagtctcaactgctgcagctattcaaattagtgttggagatgcaatttatagagataaaatactctagaagctatcgctgtagccggattaaattctgacctacttgtatagttttacacttacacagtgcaagtaataatatttaagggaagcagagagcactctaggcggccgctcaaaaaaaaaaaaaaaaaaaaaaaaaaaaaaaaaaaaag

SEQ ID NO: 148 - protein, 205 aa, Zea mays
  G3728 polypeptide  Orthologous to G1274
MATSLGLNPEDLFTSYSSSYYSSPPFMSDYAASFTPAAGDSTAFSSELDDLHHFDYSPAPIVTAAGAGAGGGDRNEKMMWCEGGGDERRLRSNGRIGFRTRSEVEILDDGFKWRKYGKKAVKNSPNPRNYYRCSSEGCGVKKRVERDRDDPRYVITTYDGVHNHASPGAAAIIVPYGSGGGNSGFYSPPHSGSPSATSYSGSLAF

SEQ ID NO: 149 - DNA, 1091 bp, Oryza sativa (japonica cultivar-group)
  G3729 Predicted polypeptide sequence is orthologous to G1274
aaagcgctctgcgtgagctgagctgagctaggcgtcgcgcgcgatgtcgtcgctgtacccgtctctcctctcgctgagcgagagccccgccgagtaccggcaggtcggcggtggccgctacgcgggggaggacgtcgtcgacgacgacgacgacatggctgccgtcgccgacgctgtgtccagctacctctccttcgacatggacgacgtcgagtattacacgccggaggtgggcttccactcaaagcagcacaacccgccgccagttgctgcggcgccactggaagccggaggaggcagggagcaaagccggcgggaagccgccgtcaatcttggcaagatggacaggggaccggcgccggtgagcggcggcgcggcgactggcggcgtgccgaggagcaagaacggcagcaagatcgcgttcaagacgaggtcggaggtggacgtgctggacgacggctaccggtggaggaagtacggcaagaagatggtcaagaacagccccaacccaaggaactactaccggtgctcgagcgaggggtgccgcgtgaagaagcgggtggagcgcgcccgggacgacgcgcgcttcgtcgtcaccacctacgacggcgtccacaaccacccggcgccgctgcacctcaggccgcagctgccgccgcccggcggctactcgatcgccggggcaccggccgtggtggcgccgcacggccgcctcgggctggaggaggccgaggtgatcgctctcttcaggggcaccaccgccacctcgctgctgcttccttgaccggccagtccgacgcggcggcgccggcggcgacaactgactagctagtgtgagtcctgggccgtacaggaatggacaattagtttgtctccgatcgaggaccaaggcgacctgaatcaaaattacggcccatcgatatatagtaggtcgtttaattcatcgaaattagacgaatttcatgtacaattattgcattacagtattatttgaaacagtattgtatatatttgctatacaatttgatggatcgtatgtctttagcagttgtaagtatattaatctatagatctagtagttcagccatgat

SEQ ID NO: 150 - protein, 246 aa, Oryza sativa (japonica cultivar-group)
  G3729 polypeptide  Orthologous to G1274
MSSLYPSLLSLSESPAEYRQVGGGRYAGEDVVDDDDDMAAVADAVSSYLSFDMDDVEYYTPEVGFHSKQHNPPPVAAAPLEAGGGREQSRREAAVNLGKMDRGPAPVSGGAATGGVPRSKNGSKIAFKTRSEVDVLDDGYRWRKYGKKMVKNSPNPRNYYRCSSEGCRVKKRVERARDDARFVVTTYDGVHNHPAPLHLRPQLPPPGGYSIAGAPAVVAPHGRLGLEEAEVIALFRGTTATSLLLP

SEQ ID NO: 151 - DNA, 850 bp, Oryza sativa (japonica cultivar-group)
  G3730 Predicted polypeptide sequence is orthologous to G1274
ctgtcaaacactcaatcagcagcagcagcagctagcttagcttagctaacgcacagtgacgcgagcatggcggcttcgctgggactctgccacgagacgtcgtacgcctactcgtacccggcgtcgaacacctcctcctccttgtgcttccctcctctcatggcggaccacatcgtcgacggcggcggcggcggcggctgttcctttggtgaattcctggagctcggccattccgtgtactcgctgccgcttccgccgccgccgtcgcagccggtggtggtcgccggcgggaacaatgatcagtatggcgtgtcgtcgtcgtcgtcggcggcggcgacgacgagcaggatcgggttcaggacgaggtcggaggtggaggtgctggacgacgggttcaagtggcgaaagtacgggaagaaggcggtgaagagcagcccgaacccgcggaactactaccggtgctcggcggcggggtgcggcgtcaagaagcgggtggagcgcgacggcgacgacccgcgctacgtcgtcaccacctacgacggcgtccacaaccacgcgacccccggctgcgtcggcggcggcggccacctcccgtaccctacttccgctgcgccgccgtggagcgttccggcggcggcggcctcgccgcctcccgcgcacgcgcaggcgtggggggcgccgctgcacgccgccgcggcggcgcactcgtcggaatcgtcgttctgaacgctgaatttacttctgtttttgtttttcttggttgcttgttagttgtaccgccgttcgtgatcgatcgatcggttcttgtatgcactagacttactacttaaaaaaaaaaaagttaaatctt

SEQ ID NO: 152 - protein, 219 aa, Oryza sativa (japonica cultivar-group)
  G3730 polypeptide  Orthologous to G1274
MAASLGLCHETSYAYSYPASNTSSSLCFPPLMADHIVDGGGGGGCSFGEFLELGHSVYSLPLPPPPSQPVVVAGGNNDQYGVSSSSSAAATTSRIGFRTRSEVEVLDDGFKWRKYGKKAVKSSPNPRNYYRCSAAGCGVKKRVERDGDDPRYVVTTYDGVHNHATPGCVGGGGHLPYPTSAAPPWSVPAAAASPPPAHAQAWGAPLHAAAAAHSSESSF

SEQ ID NO: 153 - DNA, 708 bp, Lycopersicon esculentum
  G3731 Predicted polypeptide sequence is orthologous to G1274
cgttccgttcaactatggaaaattttccctatagctcatcaaaccctaaccctaattttatcgacgcatcggagaattttgagctctccgattataattatctttttctcgatgatggatcgagtgacgattttttgtcacaaaatgaaattgttcaaagtgtttccgatactagtggttcatattcaaataatcctactccaacaagtcataacataaaatgtatgaaaggtataaagaaggtggatgcaaagtctaaggttgcatttagatttagatcagagttggaggtgttggatgatggatttaaatgtaggaaatatggcaaaaagatggtcaagaataatccaaatccaaggaattactacaaatgttcaagtgggggatgcaatgtgaagaaaagagtagaaagggacaataaagattcaagctatgtcattactacttatgaagggattcacaaccacgagagtcctcatgtgcttcactacacacaattccctcccaacaatattgcccttcacaatcttcacctttagaacctcttaaacgtgtcagtaaagtttagttatatatttgtattatggtaggttctaatggagcactttgattatatgataaagtgtttttattgaacattttcgacatatgttttaaaaaagttgtgcacgaattttcaagtgctaaatatatagataagttaatcgc

SEQ ID NO: 154 - protein, 174 aa, Lycopersicon esculentum
  G3731 polypeptide  Orthologous to G1274
MENFPYSSSNPNPNFIDASENFELSDYNYLFLDDGSSDDFLSQNEIVQSVSDTSGSYSNNPTPTSHNIKCMKGIKKVDAKSKVAFRFRSELEVLDDGFKCRKYGKKMVKNNPNPRNYYKCSSGGCNVKKRVERDNKDSSYVITTYEGIHNHESPHVLHYTQFPPNNIALHNLHL

SEQ ID NO: 155 - DNA, 743 bp, Solanum tuberosum
  G3732 Predicted polypeptide sequence is orthologous to G1274
tttctatcttttctttcccttcaacaatggaaaattttccatatagctcatcaaaccctaaccctaatttcatcgatgcatcggagaattttgagctctcagattataattatctctttcttgatgatggatcaaatgacgattttttgtcacaaaatgaaattgttcaaagtgtttccgatagtagtggatcatattcaaataatcccactccaacaagtcataacataaaatgtatgaaaggtgtaaagaaggtggatgcaaagtctagggttgcatttagatttagatcagagttggaggtgttggatgatggatttaaatggaggaaatatggcaaaaagatggtcaagaatagttcaaatccaaggaattactacaaatgttcaagtggaggatgcaatgtgaagaaaagagtagaaagggacaatgaagattcaagctatgtcattactacttatgaagggattcacaaccatgagagtccttatgtgtttcactacacacaattccctcccaacaatattgcccttcacaatctttgcctttagaacctcttaaacgtgtcagtaaatttcagttatatatttgtataatggtaggttctaatagagcactttgatcatatgataaagtgtttctattaaacattttcgacttatgttttaaaaaaatgtgtgcacgtgttttcaagtgcccgatatatagataagttaatcacataaaatatgtctctttctttg

SEQ ID NO: 156 - protein, 174 aa, Solanum tuberosum
  G3732 polypeptide Orthologous to G1274
MENFPYSSSNPNPNFIDASENFELSDYNYLFLDDGSNDDFLSQNEIVQSVSDSSGSYSNNPTPTSHNIKCMKGVKKVDAKSRVAFRFRSELEVLDDGFKWRKYGKKMVKNSSNPRNYYKCSSGGCNVKKRVERDNEDSSYVITTYEGIHNHESPYVFHYTQFPPNNIALHNLCL

SEQ ID NO: 157 - DNA, 1387 bp, Hordeum vulgare
  G3733 Predicted polypeptide sequence is orthologous to G1274
gaattcggcaccagggcgctcaccatcgccgaagcttctcagcgcgaagctcaccgggaagccgaccaaaatcccccgggaaaaaaagagagctctcacggccggcgccatctccaactagtacaaatctacccgccaaatccactccccaacccaatccatgcagcagcagcagcagcagcgcaccggcgatttagggggtcttatatattataaataggaagcgctctcgccggtgacaaactcggtcatggcggcagtcggagcggcaccagtgctctaccaacagcaggcgcaggcggtgggcgacgcctgcttcttctcctccatgtcctcctacttctccaacgaggcaatcagctcctcctgctccagcccagcctccagcttctccgccgcgctgggcgccacgccgcccgctgcgccggcgatcagccccgaccccgcgtcgcagttcgacatctccgagtacctctacggcgacggcccgttagccgcgccgctggcgcccgttggcgctgctgttgcaagctcggcgactgcggtgcctgcgaggagcgcggccgagtcggcggcggcggtggagaggccgcggacggagcgcatcgcgttccgcacgaggacggagatcgagatcctcgacgacggctacaagtggcgcaagtacggcaagaagtccgtcaagaacagcccaaacccaaggaactactaccggtgctcgacggaagggtgcagcgtgaagaagcgggtggagcgggaccgggacgacccggcgtacgtggtgaccacgtacgagggcacgcacagccacgccagccccagcaccgtctactacgccagccaggacgccgcctccggccgcttcttcgtcgccggcacgcacccgccgccaggctccctcaactgagtagactagccaccaacgacggagcacgtcgagatcagcacgtacggggcttccatcttgggcaagctagccagctcgggcctcggtgccgtagcagccacaagttcgtagttaaactagtgcactactggttcaggttcggtttcccgactgtagtgttgtgtactgcggtgtgcactgtcggctcgatcaccaggttttatccctcgagcataattagtggatcgaaagagcccggccggggaacgtaactcagtccactactagtgctgcctacttaaccgtgtaataaaaatacccatgtgccgtttccctcagcccataggcctccgagagttccatgtttaagcaccaacatgcatcaaagagcatctaaaaaaagcatcaaagagatccatgtagaaaaagtttgtcgtattacccgacagaaaaaagtttgtagcatttttttggtaaataattttggaaggttttacagtt

SEQ ID NO: 158 - protein, 218 aa, Hordeum vulgare
  G3733 polypeptide  Orthologous to G1274
MAAVGAAPVLYQQQAQAVGDACFFSSMSSYFSNEAISSSCSSPASSFSAALGATPPAAPAISPDPASQFDISEYLYGDGPLAAPLAPVGAAVASSATAVPARSAAESAAAVERPRTERIAFRTRTEIEILDDGYKWRKYGKKSVKNSPNPRNYYRCSTEGCSVKKRVERDRDDPAYVVTTYEGTHSHASPSTVYYASQDAASGRFFVAGTHPPPGSLN

SEQ ID NO: 159 - DNA, 653 bp, Medicago truncatula
  misc_feature (605)..(605): n is a, c, g, or t
  misc_feature (610)..(610): n is a, c, g, or t
  misc_feature (615)..(615): n is a, c, g, or t
  misc_feature (625)..(625): n is a, c, g, or t
  misc_feature (647)..(647): n is a, c, g, or t
  misc_feature (652)..(652): n is a, c, g, or t
  G3735 Predicted polypeptide sequence is orthologous to G1792
ctaatccttcatactaaagaaaacatagacttataacaaaaatattattatttacttcgtatatttttgtgtttcaaattaatggagggagatcataaattagtttcaaattcaacaaatggaaatggaaatggaaatggaaattcagatcaaataaagtatagaggaattcgtagaagaccatggggaaaatttgcagcagaaattcgtgacccaacaaggaaagggacaagaatatggcttggaacatttgatactgctgaacaagctgcaagagcttatgatgctgctgcttttcattttcgtggtcatagagctattctcaatttccctaatgaatatcaagctcctaattcatcttcttcattacctatgcctcttactatgcctccaccaccttcttctaatccacctccttcttcttcttcttcttcctctttttcttcttacaccgttgatgatggttttgatgagcttgaattcttggataataagttgcttcaagaacttcttcaagatggaacacaatagttaactattgaagatcaagtggcatgaaatgtattggtggtcatttaattttctcttcattaatttattttggnttggntatgnatctcatttntatgaataaatgagaatggggnattana

SEQ ID NO: 160 - protein, 149 aa, Medicago truncatula
  G3735 polypeptide  Orthologous to G1792
MEGDHKLVSNSTNGNGNGNGNSDQIKYRGIRRRPWGKFAAEIRDPTRKGTRIWLGTFDTAEQAARAYDAAAFHFRGHRAILNFPNEYQAPNSSSSLPMPLTMPPPPSSNPPPSSSSSSSFSSYTVDDGFDELEFLDNKLLQELLQDGTQ

SEQ ID NO: 161 - DNA, 859 bp, Triticum aestivum
  G3736 Predicted polypeptide sequence is orthologous to G1792
gcacgaggcttcattctccctcgttccatccaagctccaccatccatcactgatttgcacttacctagctactccgcaacccccacttccggcttcttcatttctcactactagtacgtagttgagattatggagggcggagaaggatccggtggcggcggcgagccgaccaagtaccgcggggtgcgccgcaggccgtggggcaagttcgccgcggagatccgggactcgagccggcacggcgtgcgcatgtggctcggcaccttcgacaccgccgaggaggccgcggccgcctacgaccgctccgcctactccatgcgcggccgcaacgccgtgctcaacttccccgaccgggcgcacgtctacgaggccgaggccaggcgccagggccagggctcttcgtcgtcggcgaggcagcagaatcagcagcagcagcaggggcagagcggggtgatcgagttcgagtacctggacgacgacgtgctgcagtccatgctccacgaccacgacaaatccaacaagtagatcgatggatcatccatccatccatccatggatcgatccataatacctactgtatcatcccggcccggccggcaacatcgacctgcgtgcatgcgcgggcgcggatgcaatctacactacctacctatgcattccggccatatattaggtacgtagattatatgtgtacgagagcctacgagctcgatgaagatcgtacgtggtgcattctgatgcatgaggattccatcgacacgaccctctaccatatatttgatgggtcgatcgagtaatttgcagccagtaatccaatcgatgatatggggttttcaaaaaaaaaaaaaaaaaaaaaaaa

SEQ ID NO: 162 - protein, 131 aa, Triticum aestivum
  G3736 polypeptide  Orthologous to G1792
MEGGEGSGGGGEPTKYRGVRRRPWGKFAAEIRDSSRHGVRMWLGTFDTAEEAAAAYDRSAYSMRGRNAVLNFPDRAHVYEAEARRQGQGSSSSARQQNQQQQQGQSGVIEFEYLDDDVLQSMLHDHDKSNK

SEQ ID NO: 163 - DNA, 882 bp, Oryza sativa (japonica cultivar-group)
  G3737 Predicted polypeptide sequence is orthologous to G1792
acacatgcatcgatcattcatggatgccgaattgccgcgatccgggcattatttcgcgccaggagacccaagatcatcgtgtcgcccacgctataaatagctagctagcttgcctttatgttgcatatgccaactgctacatgcaggacgtctgaaactatcattagtgacctgcagcgcctgcagtatatatatacaagtagtagtgagcatggaggacgacaagaaggaggcggcgagcaagtaccgcggcgtacggaggcggccgtggggcaaattcgcggcggagatccgcgacccggagcgcggcggctcacgcgtctggcttggcacgttcgacaccgccgaggaggccgcgcgagcgtacgaccgcgccgcattcgccatgaagggcgctatggccgtgctcaacttcccaggcaggacgagcagcaccggctcttcgtcgtcatcgtcatccacgccgccagctccggtgacgacgagccgccactgcgccgacacgacggagaaggtggagcttgtgtaccttgacgacaaggtgctcgacgagctccttgcggaggactacagctaccgcaacaacaacaactactgatccggccgtcgatgaactgagacggatcgacatggggccggtcgtcggtacgctcgctgaaacgagacccggattgctatcaataagcaagcagaagaaaaccgtctcctatatatagcttcttctgttggcacaagcatatatgggcatgcatgacacatgctactgtgaattgacgggtgtgtgctgtgtgcagactactaaaccacgcttgcaagttgcacgtacgacgtggttgtcaagagcatgcagtccacgaagcagagaaaaacacctggtttatc

SEQ ID NO: 164 - protein, 128 aa, Oryza sativa (japonica cultivar-group)
  G3737 polypeptide Orthologous to G1792
MEDDKKEAASKYRGVRRRPWGKFAAEIRDPERGGSRVWLGTFDTAEEAARAYDRAAFAMKGAMAVLNFPGRTSSTGSSSSSSSTPPAPVTTSRHCADTTEKVELVYLDDKVLDELLAEDYSYRNNNNY

SEQ ID NO: 165 - DNA, 899 bp, Zea mays
  G3739 Predicted polypeptide sequence is orthologous to G1792
cgatataattcactcctctcaacgctcgctgcacacacacaccagtgaacctagccagccatttgccgcatcgatcatcagtcgctgtcacgcgcgccaaaccaaaccaaagcccaaacccagctgcaagtgctactgacagcagctagcaaacacacacccgtcgccatcgctatggacggcgactggtccaaggacggcggaggtggagagccgaccaaatatcgcggcgtgcggcggcggccctggggcaagtacgcggccgagatccgcgactcgagccgccacggcgtccgcatctggctgggcaccttcgacaccgccgaggaggccgccagggcgtacgaccggagcgcctactccatgcgcggcgccaacgccgtcctcaacttcccggaggacgcgcacgcctacgccgccgcctgccgcggctccggatcctcctcatcctcgtccaggcataggcagcagcagcagcagggctccggcagggacgtgatcgagctcgagtacctcgacgacgaggtgctgcaggagatgctcaggaaccacgagccgtcgtcgtctgcgaggaagaagatgtaatgcaagacgactggtacacgtggcgaatgcacgttgcacatcagaatgccatgtatgcgtggggggttacgttcaattgtatgcatgcagtgcagtgactaccggccggctctcctggatatgtcggccatctctctctatatattattaaaatgtcagctcccttctctaatttggcgggagttacatcagtggtactatgcagagttgcatacttgcatatatatgcacattattaattaataactcgatctctcgtggacggtggaacagtgataatcatctcattgtcaattaattttgatcaaagaaat

SEQ ID NO: 166 - protein, 136 aa, Zea mays
  G3739 polypeptide Orthologous to G1792
MDGDWSKDGGGGEPTKYRGVRRRPWGKYAAEIRDSSRHGVRIWLGTFDTAEEAARAYDRSAYSMRGANAVLNFPEDAHAYAAACRGSGSSSSSSRHRQQQQQGSGRDVIELEYLDDEVLQEMLRNHEPSSSARKKM

SEQ ID NO: 167 - DNA, 645 bp, Oryza sativa (japonica cultivar-group)
  G3740  Predicted polypeptide sequence is orthologous to G3086
atggccagcaacggctttccaggctcaaaaggcgggggaggcagcggagccgaagcccaccaccacccttccatggccggcagcggcagcggcagcagcagcggcgggaggaagatgaagtcccagctgagcttcacggccgggccgccgcacctctcgcacatcgcggaggacggcgccttccccgaccgcgccggcgccgaggcctccgtgccccgcaccttctccgccggcggcagcagcggcggcggcgggttctccatcgtcgggccgtgggaggagtccagggacatcatctccaccctcggcgggtacgagtcccagttcggcggcatggcgagcacgtcggcgctggagatggccggcatggacaggtacctgcagctgcagcatgaccaggtgccgttcaaagtgcgggccaagcgcggctgcgcgacgcaccccaggagcatcgcggagagggaacggaggacgagaattagcgagaagctcaggaagctgcaggagctggtgcccaacatggacaagcaaacaagcacagcggacatgttggaccttgcagttgagcacatcaagggtctgcagagccagctgcaggctctgaagcatgagcaggagaagtgcacttgctgcagcaggccttga

SEQ ID NO: 168 - protein, 214 aa, Oryza sativa (japonica cultivar-group)
  G3740 polypeptide Orthologous to G3086
MASNGFPGSKGGGGSGAEAHHHPSMAGSGSGSSSGGRKMKSQLSFTAGPPHLSHIAEDGAFPDRAGAEASVPRTFSAGGSSGGGGFSIVGPWEESRDIISTLGGYESQFGGMASTSALEMAGMDRYLQLQHDQVPFKVRAKRGCATHPRSIAERERRTRISEKLRKLQELVPNMDKQTSTADMLDLAVEHIKGLQSQLQALKHEQEKCTCCSRP

SEQ ID NO: 169 - DNA, 1110 bp, Oryza sativa (japonica cultivar-group)
  G3741 Predicted polypeptide sequence is orthologous to G3086
atgaacccggcgccgtcgagggcgccgcagcggcagcagcgcggaggggagatgtcggcgcgctacggcggcgggctgcagttcttcgctgacgccccgccggcgggggtggaggggggcgccgcgaccgcgcggacgttcttcccggtgccgggcgggggaggggagcagcagccgccggagcgcgcgatgaggcagcagcactacggcggcggcgggagtggtgcggccgagatctcgctggggcacggccacggccacggcggcaagcaccatttccatcagttcggcgtcgaggcgaaggacggtggcggcggcggcgaccagtcggggtttctgacgcggcacaacagctcgcctcccgggttcttctcgagccccgtcatggacaacggtttctcatcgagtgctagaccagcaggatcatcactcggtgaggttcgccatggcgccatgagcagcagcagcaacaacaacaagaagatgaaggccccactgagcttcgctagcagcaggcagggctccggcggcctctcccagatatccgaggacggcatcccggacctcactgacagcatccatggcgccgctcatcatcatgggcgctccgaggagaacgtctccacccacgaccacgtcgtccgctccttctcctccggtgggttctcgatcgggtcatgggaggactccaactccatcgtgttctccacgtcgacgggcaaatcaggagcgcacggcaacgacgacatcatcgccacccctagcaactacgaatctcagcttgttgcgcccagggagatggctggcgtagagaaatacctgcagatgcagcacgaccaggtgccattcagagtacgggccaagcgtggatgcgcgacgcacccacggagcatcgcagagagggagagaagaacgaggatcagcgagaagctcaggaagttgcaggccctggtgcccaacatggacaagcaaacgagtacttcagacatgctggacttagcagttgatcacatcaagggactgcagagccagctgcagactctgaaggaagacaaggagaaatgcacctgcagctgcaagcaagcatcaaggaacagaccagccgactaa

SEQ ID NO: 170 - protein, 369 aa, Oryza sativa (japonica cultivar-group)
  G3741 polypeptide  Orthologous to G3086
MNPAPSRAPQRQQRGGEMSARYGGGLQFFADAPPAGVEGGAATARTFFPVPGGGGEQQPPERAMRQQHYGGGGSGAAEISLGHGHGHGGKHHFHQFGVEAKDGGGGGDQSGFLTRHNSSPPGFFSSPVMDNGFSSSARPAGSSLGEVRHGAMSSSSNNNKKMKAPLSFASSRQGSGGLSQISEDGIPDLTDSIHGAAHHHGRSEENVSTHDHVVRSFSSGGFSIGSWEDSNSIVFSTSTGKSGAHGNDDIIATPSNYESQLVAPREMAGVEKYLQMQHDQVPFRVRAKRGCATHPRSIAERERRTRISEKLRKLQALVPNMDKQTSTSDMLDLAVDHIKGLQSQLQTLKEDKEKCTCSCKQASRNRPAD

SEQ ID NO: 171 - DNA, 837 bp, Oryza sativa (japonica cultivar-group)
  G3742 Predicted polypeptide sequence is orthologous to G3086
atggcttccgccatggcgggactctaccgcaccgtcagctccggcggcacggagtccaccgccgccgccgccggcaacagcctcctccggcagagcagctcccccgccggcttcctcaaccatcttaccatggacaacggatacgggaatatgctaagagcgggcatgggcggcggcggcggtggcggcgacccgcggctcaaggggcagctcagcttctcgtcgcggcaggggtcggtgatgtcccagatctcggagatgggcagcgaggacgaggagctcgccggcggcggcggcagcccggaggctggcagcaacggcggtggcgccgcacgcggcggctacggcggcgggtacgcgatggggtcctccgcctgggaggagccctcgccgccggcgacgtcgctcctcccggacagcagcctcccgtccaagcgcccccgcgacgacctgccgcggcagctcagcctcccggcggcgtccaagaacagcagcaagcccccctcctccgcctccgccgccgcgtcgccggagatggccgccatcgagaagttcctccagttccaggacgccgtcccctgcaagatccgcgccaagcgcggctgcgccacccacccccgcagcatcgccgagcgggtgaggaggacgcggatcagcgagcggatacggaagctgcaggagctcgtccccaacatggaaaagcaaaccaacactgctgacatgttggatcttgccgtggactacatcaaggagctccagaagcaggtcaaggtgttaaacgacagccgttccagctgcacctgctcggcgagcaagcagaagcacttcgccggctaa

SEQ ID NO: 172 - protein, 278 aa, Oryza sativa (japonica cultivar-group)
  G3742 polypeptide  Orthologous to G3086
MASAMAGLYRTVSSGGTESTAAAAGNSLLRQSSSPAGFLNHLTMDNGYGNMLRAGMGGGGGGGDPRLKGQLSFSSRQGSVMSQISEMGSEDEELAGGGGSPEAGSNGGGAARGGYGGGYAMGSSAWEEPSPPATSLLPDSSLPSKRPRDDLPRQLSLPAASKNSSKPPSSASAAASPEMAAIEKFLQFQDAVPCKIRAKRGCATHPRSIAERVRRTRISERIRKLQELVPNMEKQTNTADMLDLAVDYIKELQKQVKVLNDSRSSCTCSASKQKHFAG

SEQ ID NO: 173 - DNA, 450 bp, Oryza sativa (japonica cultivar-group)
  G3744 Predicted polypeptide sequence is orthologous to G3086
atgagctccgggtgggaggagtcgtcgctcatgtcggacacgaacatctccggcgtgaagcgccagcgcgactcgtcggagccgtcccagaacggcggcggcggcggcggcctggcgcaccagttcagcctgccgaagacctcgtcggagatggcggccatcgagaagttcctccagttccaggacgcggtgccctgcaagatccgcgccaagcgcggctgcgccacgcacccgcgcagcatcgccgagcgggtgaggaggacaaggatcagcgagcgaatcaggaagctgcaagaactcgtgccaaacatggacaagcaaaccaacactgctgacatgctggatttggctgttgactacatcaaggatcttcagaagcaggtcaagggattaaacgacagccgagctaactgcacctgctcagcgaagcatcagcagtactctggctag

SEQ ID NO: 174 - protein, 149 aa, Oryza sativa (japonica cultivar-group)
  G3744 polypeptide  Orthologous to G3086
MSSGWEESSLMSDTNISGVKRQRDSSEPSQNGGGGGGLAHQFSLPKTSSEMAAIEKFLQFQDAVPCKIRAKRGCATHPRSIAERVRRTRISERIRKLQELVPNMDKQTNTADMLDLAVDYIKDLQKQVKGLNDSRANCTCSAKHQQYSG

SEQ ID NO: 175 - DNA, 1164 bp, Oryza sativa (japonica cultivar-group)
  G3746 Predicted polypeptide sequence is orthologous to G3086
atgaacaggatgacggcgccgcacggggggatgccgccgccgccgatgccggcggcgggggggctggcgaggtacggctcggcgccggggtcgctgctggcgtcgatcgccgactcggtgatccggggccgcggggttggggttgtcgatcagctgcatcatcatcagcatcagcatcagcttccgccgccgccgccgccgcagcagcagcagatggtggggaggtacttctccgcggagtcgtcggggctcacctcctgcgagtccagctgccggacgacgacgacgacgtccacagcggcggcggccgatgtcgggcggcacccgctcgagcgcgcgtacggcggctccggcgagatccacgtcgacgcctcctccgccgccgtcccgctcttccgccacagcagctcccccgccggcctcctctcccgcctcatggctgacccgcacggcaatggcatggccgcgacgagagggatgggcggctactccggcggcggcggcgacgccggcgcgatggcgcacaggaggctgagctcgcagtggagcttctcgcggcaggacctgccgcagatatcggagatgggcggcctcatccccgacatcggggagagcatcgtcaccggcggcggcggcaacagctccagcgatggcgccggccacggcgcgcagtcctcctccttcctctcctccaggaacttctccatgagctcctgggacgacaccaactccatcatgttctcgcccccgagcagcagcaagaaggcccgcgtcgccgccgccgccgccggcgaccacggcgacgacatggtctccagcttcagcaacatcgactcccagtttggcttgtcgaagcagtcgtcgctggagatggccggcatggatgacttcttgcagctccagccagactccgtcgcctgcagggcccgggcaaagcgcggctgcgcgacgcacccgcggagcatcgctgagagggagaggagaacgaggattagcaagaggctgaagaagctgcaggatctcgtgccgaacatggacaagcaaacgaatacatcagacatgttggatattgctgtaacctacatcaaggagcttcagggccaagttgagaagctaaaacatgaccaagcaaactgcacttgctcaggcaagcacgattgctga

SEQ ID NO: 176 - protein, 387 aa, Oryza sativa (japonica cultivar-group)
  G3746 polypeptide  Orthologous to G3086
MNRMTAPHGGMPPPPMPAAGGLARYGSAPGSLLASIADSVIRGRGVGVVDQLHHHQHQHQLPPPPPPQQQQMVGRYFSAESSGLTSCESSCRTTTTTSTAAAADVGRHPLERAYGGSGEIHVDASSAAVPLFRHSSSPAGLLSRLMADPHGNGMAATRGMGGYSGGGGDAGAMAHRRLSSQWSFSRQDLPQISEMGGLIPDIGESIVTGGGGNSSSDGAGHGAQSSSFLSSRNFSMSSWDDTNSIMFSPPSSSKKARVAAAAAGDHGDDMVSSFSNIDSQFGLSKQSSLEMAGMDDFLQLQPDSVACRARAKRGCATHPRSIAERERRTRISKRLKKLQDLVPNMDKQTNTSDMLDIAVTYIKELQGQVEKLKHDQANCTCSGKHDC

SEQ ID NO: 177 - DNA, 531 bp, Zea mays
  G3755 Predicted polypeptide sequence is orthologous to G3086
atgtcccagatctcagagatggacagcgaggaggtcggagggagcagcccagaggctgccggcggcggcagggggtacatccctgggtacccaatgggctctgggtgggaggactcgtcggctctcttgtcagacaatttgtctggcatcaaacgcccccgggactcgtcggagcctggccagagcggccttacgcaccagttcagcgtgcccaagacgtcgtccgagatggcaactattgagaaattcctccagttccaggacgccgtgccttgtaagatccgtgccaagcgggggtgcgccactcatccacgcagcatcgctgagagggtgaggagaacaaagatcagtgagcgaatccgaaagctgcaagaactcgttccaaatatggacaagcaaaccaacacatctgacatgctggatttggctgtcgactacatcaaggatctccagaagcaggttaaggtgctaaaggagagccaagataattgcacctgctcagcaagcaagaaccagcagcactcctgctga

SEQ ID NO: 178 - protein, 176 aa, Zea mays
  G3755 polypeptide  Orthologous to G3086
MSQISEMDSEEVGGSSPEAAGGGRGYIPGYPMGSGWEDSSALLSDNLSGIKRPRDSSEPGQSGLTHQFSVPKTSSEMATIEKFLQFQDAVPCKIRAKRGCATHPRSIAERVRRTKISERIRKLQELVPNMDKQTNTSDMLDLAVDYIKDLQKQVKVLKESQDNCTCSASKNQQHSC

SEQ ID NO: 179 - DNA, 711 bp, Glycine max
  G3763 Predicted polypeptide sequence is orthologous to G3086
atggcaaatcttgcagcagcattgagagatgtggcaagttttaggggctgtgatgtctcaaatggacaagctattacatcctctagtggattgcatggtactttgaacttctcatctaggccatcctcttgctccacccggatgccacagattgctgaaaatggaaatgaagatgtggaagcaaattgtgttgaaagtagaaacctgagaaatgacaatatcaacaccactaaatgttacatgcctagtttcaccactgacttctgggatggttctgcattcagtgcctccagaacagctagtaacagaggtgaaatctcattttccacttcaaaggctatggatattcaggatgaagattttggataccaaaaagttggtttgacccaccatttgagtctgcctggctcttccagtaggatggctacaatggagaagctttatcaaattcaaggatctgttccatgtaaaattcgtgccaagagaggttttgccactcacccgagaagtattgctgaaagggaaaggagaacacgaattagcgcaagaatcaagaaattgcaagaccttttcccaaaatcagacaagcaaacaagcactgcagatatgttggatttggcagttgagtacattaaagacttgcagaaacaagttaagattctcagagatactagggcaaattgcacttgtacaagcaatcagaagcactga

SEQ ID NO: 180 - protein, 236 aa, Glycine max
  G3763 polypeptide  Orthologous to G3086
MANLAAALRDVASFRGCDVSNGQAITSSSGLHGTLNFSSRPSSCSTRMPQIAENGNEDVEANCVESRNLRNDNINTTKCYMPSFTTDFWDGSAFSASRTASNRGEISFSTSKAMDIQDEDFGYQKVGLTHHLSLPGSSSRMATMEKLYQIQGSVPCKIRAKRGFATHPRSIAERERRTRISARIKKLQDLFPKSDKQTSTADMLDLAVEYIKDLQKQVKILRDTRANCTCTSNQKH

SEQ ID NO: 181 - DNA, 1356 bp, Glycine max
  G3764 Predicted polypeptide sequence is orthologous to G3086
atgagtgttatgtatagtcctgttctcaattactcagatgtggagcatcagctaaggaaaaatcaagacatggattcaagtattggacatccacaacaacactgtcaccaacccaattctggactattgaggtattgttctgctccaagctcattgctggcaagcctcattgacaacaccattcatggctgtgtcaacgaggaatcgttcacaagtgagaatcatcatcatcatcagcagcagcagcagcagcattatcttccatctacaagttcagaaatggagaccatgttatccaaattgctaccatccaacaatggatggagcaattcagaagctttgcaagaatttggaggcaagccctgtgaagcaggaaataggggaatctattccacaagagccaccacaacagaatggttattcttatggtggctctcagttgatttaccaatctcagcaaattcaaggccttgccaaatggtggatcttccagtggcttctggcagtgcttttgatggctcttttggtgtggtgcactccatggcttcagaggactccattcaatctaaaatgggtatcaggaattgctccaatctctttaggcaaaagagttcccctgctgcatttttctccattgaaaatgatcttgcagcattgagagaagtaggaagctttaaagccgatgatgtttcaaatggactagttactgcatcaactggtgggttgcatagttctcatactttctcatctaggccatcttcatgcttgaaacggttgccacaaatagccgaaaatggaaatgaaagcctagaagaaaattgtgaccaaagtagaaacctagtaaatgacaatggtagctcaaaatgttacatacctagcttcaccaatgaattatgggaaagttctgcattcaatgccccaaaaacagagaatgaagatgaaatcatgttttccacttcaaatattttggaatctcaggaagcagatttcagctttcaaaatctgggtttgactcaccatttgagtctacctagctcttctactaagatgtcatccatagaaaagtttcttcagattcaaggttctgttccttgtaaaattcgagccaaaagaggctttgccactcacccaagaagtattgcagagagggtaagaagaacaagaattagtgaaagaatcaagaaactgcaagacctttttccaaaatcagaaaagcaaacaagcacagcagatatgttagatttggcagttgagtatattaaggacctgcagcaaaaagttaagatactctcagattgtaaggcaaagtgcaaatgtacaagtaatgagaagcattacactagaacttgtgcttga

SEQ ID NO: 182 - protein, 451 aa, Glycine max
  G3764 polypeptide  Orthologous to G3086
MSVMYSPVLNYSDVEHQLRKNQDMDSSIGHPQQHCHQPNSGLLRYCSAPSSLLASLIDNTIHGCVNEESFTSENHHHHQQQQQQHYLPSTSSEMETMLSKLLPSNNGWSNSEALQEFGGKPCEAGNRGIYSTRATTTEWLFLWWLSVDLPISANSRPCQMVDLPVASGSAFDGSFGVVHSMASEDSIQSKMGIRNCSNLFRQKSSPAAFFSIENDLAALREVGSFKADDVSNGLVTASTGGLHSSHTFSSRPSSCLKRLPQIAENGNESLEENCDQSRNLVNDNGSSKCYIPSFTNELWESSAFNAPKTENEDEIMFSTSNILESQEADFSFQNLGLTHHLSLPSSSTKMSSIEKFLQIQGSVPCKIRAKRGFATHPRSIAERVRRTRISERIKKLQDLFPKSEKQTSTADMLDLAVEYIKDLQQKVKILSDCKAKCKCTSNEKHYTRTCA

SEQ ID NO: 183 - DNA, 687 bp, Glycine max
  G3765 Predicted polypeptide sequence is orthologous to G3086
atgaaaggtgttggaaactatagtggggtcaatggcaatgatggtgaacttagtctatctatgaacagaatgaagaatcacattagcttctcatcaataagtccttcttcttccttgggaatgctatcaccaacctccaaaatgggcacggagggtattagggtaactagacctgaggatgggagacagggaagttgcaatggtgatgctcgatattatggtcctggattcccttatgcttcttggaatgagccctcacaccccaaaagacagcgaagtagtaatgatgagttactttttgattctcagaatggagagccaggaaatcaagttcaaaggctttcgcatcatttgagtttgccaagaacgtcgtcggagatgtttgctatggataatttgcttcagttctcagattctgttccttgtaaaatcagagcaaagagaggctttgctactcatcctcgaagcattgccgaaagggtgagaagaacaaggatcagtgaacgaataagaaaattgcaagagcttgttccaaccatggacaagcaaactagcacagcagagatgttggacttggctttagactacataaaagatcttcagaaacaattcaagactctgagcgataaacgggctaaatgcaaatgtataaacatgcagaagtcagaagcagatcgagttgcttga

SEQ ID NO: 184 - protein, 228 aa, Glycine max
  G3765 polypeptide  Orthologous to G3086
MKGVGNYSGVNGNDGELSLSMNRMKNHISFSSISPSSSLGMLSPTSKMGTEGIRVTRPEDGRQGSCNGDARYYGPGFPYASWNEPSHPKRQRSSNDELLFDSQNGEPGNQVQRLSHHLSLPRTSSEMFAMDNLLQFSDSVPCKIRAKRGFATHPRSIAERVRRTRISERIRKLQELVPTMDKQTSTAEMLDLALDYIKDLQKQFKTLSDKRAKCKCINMQKSEADRVA

SEQ ID NO: 185 - DNA, 351 bp, Glycine max
  G3766 Predicted polypeptide sequence is orthologous to G3086
atgttatcacatcacttgagtttaccaaaaacttcagcagagatgattactatggagaagttgcttcagttccctgattctgttccttgtaaaatcagagcaaagcgaggctgtgctactcatcctcgaagcattgctgaaagggtgagaagaactcggatcagtgaaagaatgaggaaattacaagagcttgtcccacacatggataagcaaaccaacacagcagacatgttggacttggctgttgaatacattaaagatcttcagaaacaattcaagactctaagtgaaaaaagggcaaactgcaagtgtataagcatgccaaaggcagatacaaatcaaattgcttga

SEQ ID NO: 186 - protein, 116 aa, Glycine max
  G3766 polypeptide  Orthologous to G3086
MLSHHLSLPKTSAEMITMEKLLQFPDSVPCKIRAKRGCATHPRSIAERVRRTRISERMRKLQELVPHMDKQTNTADMLDLAVEYIKDLQKQFKTLSEKRANCKCISMPKADTNQIA

SEQ ID NO: 187 - DNA, 666 bp, Glycine max
  misc_feature (234)..(234): n is a, c, g, or t
  G3767 Predicted polypeptide sequence is orthologous to G3086
atggggactttgggggctgttaataacagtatcgaagatgcaaaattttctagttcgagaaggttgaagaatcaaccgaactattcttcgtcggggagaatgtcgtccaatgctgaaattggggacaaagggaatcgagaaagtagtccagacaatgaagcttttgctgatggtaacgattttatcaccggtttccaagttggtcattgggatgatgctgcaatcatgtctganaacgttggtggtctcaaaagatttagagaaaacgattcaaaaccattttctggcttaaatgcggctgagactcagaatgaaacaggacagactcatgctcctttggcccatcagttgagtttgccaaatacttcagctgaaatagctgccattgagaagtttctgcagttttcagattctgttccgtgcaaaatccgtgccaaacggggctgtgccactcacccaagaagcattgcagagagggttagaagaactaaaattagtgagcgtatgaggaaacttcaagatcttgtcccaaacatggacaagcaaactaacacagctgatatgttggacttggctgtggattacatcaaagaccttcaaaagcaagttcagacgctttcagattgtcatgcaaagtgtacgtgttcacacgagaagcaacaataa

SEQ ID NO: 188 - protein, 221 aa, Glycine max
  misc_feature (78)..(78): Xaa can be any naturally occurring amino acid
  G3767 polypeptide  Orthologous to G3086
MGTLGAVNNSIEDAKFSSSRRLKNQPNYSSSGRMSSNAEIGDKGNRESSPDNEAFADGNDFITGFQVGHWDDAAIMSXNVGGLKRFRENDSKPFSGLNAAETQNETGQTHAPLAHQLSLPNTSAEIAAIEKFLQFSDSVPCKIRAKRGCATHPRSIAERVRRTKISERMRKLQDLVPNMDKQTNTADMLDLAVDYIKDLQKQVQTLSDCHAKCTCSHEKQQ

SEQ ID NO: 189 - DNA, 798 bp, Glycine max
  G3768 Predicted polypeptide sequence is orthologous to G3086
atggagcaaggatcgttttcaatgggactcaggcatagtggaaataattctaaccttaccaggcatagtagctctcccgcaggactattttcccaaattaacattgaaaatgtgtatgctggtgtgagaggcatggggagtttgggagctgttaacaacagtatcgaagatgcgaaattttctagttcgaggaggttgaagaatcaaccgaactattcttcgtcggggagaatgtcgtccattgctgaaattggggacaaagggtatagagaaagtagtccagacagtgaagcttttgctgatggtaacgattttatggccggttaccaagttggtcattgggatgatactgcaatgatgtctgacaacgttggtggtctcaaaagatttagtgaagaagattcaaaaccattttctggcttaaatgcggttgagactcagaatgaaacgggacagactcatgctcctttggcccatcagttgagtttgccaaatacttcagctgaaatggctgccattgagaagtttctgcagttttcagattctgttccgtgcaaaatccgtgccaaacggggctgtgccactcacccaagaagcattgcagagagggtaagaagaactaaaattagtgagcgtatgaggaaacttcaggatcttgtcccaaacatggacaagcaaactaacacagctgatatgttggacttggctgtggattacatcaaagaccttcaaaagcaagttcagacactttcagattgtcatgcaaagtgtacgtgttcacacgagaagcaacaataa

SEQ ID NO: 190 - protein, 265 aa, Glycine max
  G3768 polypeptide Orthologous to G3086
MEQGSFSMGLRHSGNNSNLTRHSSSPAGLFSQINIENVYAGVRGMGSLGAVNNSIEDAKFSSSRRLKNQPNYSSSGRMSSIAEIGDKGYRESSPDSEAFADGNDFMAGYQVGHWDDTAMMSDNVGGLKRFSEEDSKPFSGLNAVETQNETGQTHAPLAHQLSLPNTSAEMAAIEKFLQFSDSVPCKIRAKRGCATHPRSIAERVRRTKISERMRKLQDLVPNMDKQTNTADMLDLAVDYIKDLQKQVQTLSDCHAKCTCSHEKQQ

SEQ ID NO: 191 - DNA, 948 bp, Glycine max
  G3769 Predicted polypeptide sequence is orthologous to G3086
atgaataatgaaccacttgttctccaacaacaacagcagcagcagcaacaacaacaacaaagtaataatatgtataattatggctcttctggtactcagaatttttaccaaagcactggacgaccacctttgccaaaccagatgaagactggtcatggaagtagttctaatcttatcagacatggtagctcacctgctggattgttttcaaacattaacattgatattactggctatgctgctgttgtaaggggcatgggaactatgggagctgctgctaataacaccagcgaggaagcaaacttttcaccagcaacaaggatgaagaataatgcaccaaacttctcttcaggactaatgtcatcaagggctgaagttggaaacaagagcaatacacagaacaataatgcagaaaatgaagggtttgctgaaagccagggcaatgagtttatccctgcaggtttccccgttggtccgtggaatgattctgcaatcatgtctgacaacgtgacaggtctgaagagatttagagatgaagatgtgaaaccattttctggtggtttaaatgcacctgaaagtcagaatgaaactggaggccaacaaccttcttcttctgctttggctcatcaattgagtttgccaaatacttctgcagaaatggcagccattgagaagtttctgcagctctcagattctgttccttgcaaaattcgtgccaaacggggctgtgccactcacccaagaagcattgcagagagggttagaagaactaaaattagtgagcgaatgaggaagctacaagatctcgttcccaacatggataagcaaacaaacacagctgacatgttggacttggctgttgagtacattaaagaccttcaaaaccaagttcagactctttcggacaatcgggcaaagtgtacgtgttcacacaagaagcagcaataa

SEQ ID NO: 192 - protein, 315 aa, Glycine max
  G3769 polypeptide  Orthologous to G3086
MNNEPLVLQQQQQQQQQQQQSNNMYNYGSSGTQNFYQSTGRPPLPNQMKTGHGSSSNLIRHGSSPAGLFSNINIDITGYAAVVRGMGTMGAAANNTSEEANFSPATRMKNNAPNFSSGLMSSRAEVGNKSNTQNNNAENEGFAESQGNEFIPAGFPVGPWNDSAIMSDNVTGLKRFRDEDVKPFSGGLNAPESQNETGGQQPSSSALAHQLSLPNTSAEMAAIEKFLQLSDSVPCKIRAKRGCATHPRSIAERVRRTKISERMRKLQDLVPNMDKQTNTADMLDLAVEYIKDLQNQVQTLSDNRAKCTCSHKKQQ

SEQ ID NO: 193 - DNA, 474 bp, Glycine max
  G3771 Predicted polypeptide sequence is orthologous to G3086
atgcaacccacatccggcggcggcgggctggcaaggttccgttcagctccggcgagctggttagaatcagttctgttgaaggaagaggaagaagaagaagaccccttaagcttcactcaactgctttccactatcgatgatgctccctctcattctcaacaccaactctatggtgccgctctctcaaacaaggataaaacacctgaaatcttcatgttagaagattccgttccttgcagagtgagggctaagcgtggctgtgctactcatcccaggagtattgctgaaagggttcgcaggactcgtatcagtgaccgcatcagaaagctgcaagaacttgtgccaaacatggataagcaaacaaatactgcagatatgttagatgaggctgtagcgtatgtcaagtttctacaaaagcaaattgaggaactgtcagagcaccaacggaggtgtaaatgcgtggttcaagagtaa

SEQ ID NO: 194 - protein, 157 aa, Glycine max
  G3771 polypeptide  Orthologous to G3086
MQPTSGGGGLARFRSAPASWLESVLLKEEEEEEDPLSFTQLLSTIDDAPSHSQHQLYGAALSNKDKTPEIFMLEDSVPCRVRAKRGCATHPRSIAERVRRTRISDRIRKLQELVPNMDKQTNTADMLDEAVAYVKFLQKQIEELSEHQRRCKCVVQE

SEQ ID NO: 195 - DNA, 861 bp, Glycine max
  G3772 Predicted polypeptide sequence is orthologous to G3086
atgtatccctcttcctcttcctcctcctcctcttcctctcagtccatgacccaagctggcctcactcgctacggttccgcccccggttctcttctcaccagcacggttgattctttattggtggatcccgtcccagtccctacttttccggagagtcttctgagtctccctgcaaagagcaaagatctttccacaaccaccccccctccttcgcttcctccttgctccgccagaaaagctctctcgacggcttcctttcccatctctccaaacaccatggggtgggtttcaaccatcacccccggtggtttatcaaattcaaattcaaattcaaattgttctctcttgaagtctcaactcagcttcacccacgaatctctttccaacactgttaatgttgatccctccagcaccaccttcggaatggatccctgggacaacaattccatcgccttttctgcaacttcaaccaagcgctccaaaaccaacaccaatgatcctgacattttacattccctgaattcggccttggaatcacagttcaatcttccacatacaagtctggaaatgtcaaccgtggacaagctattgcacattcctgaagattctgtcccttgtaaaatccgtgctaagcgaggttgtgctactcatccccgtagcattgccgagcgggagagaagaacaaggatcagtggcaagctcaagaaattacaggaccttgtacccaatatggataagcaaacaagctatgcagacatgctcgatttggccgttcaacacattaaaggtcttcaaactcaggttcagaagcttcacaaagaaatggagaattgcacttgcggatgcaaacaaagcaaataa

SEQ ID NO: 196 - protein, 286 aa, Glycine max
  G3772 polypeptide  Orthologous to G3086
MYPSSSSSSSSSSQSMTQAGLTRYGSAPGSLLTSTVDSLLVDPVPVPTFPESLLSLPAKSKDLSTTTPPPSLPPCSARKALSTASFPISPNTMGWVSTITPGGLSNSNSNSNCSLLKSQLSFTHESLSNTVNVDPSSTTFGMDPWDNNSIAFSATSTKRSKTNTNDPDILHSLNSALESQFNLPHTSLEMSTVDKLLHIPEDSVPCKIRAKRGCATHPRSIAERERRTRISGKLKKLQDLVPNMDKQTSYADMLDLAVQHIKGLQTQVQKLHKEMENCTCGCKQSK

SEQ ID NO: 197 - DNA, 1656 bp, Pinus taeda
  G3782 Predicted polypeptide sequence is orthologous to G3086
atgtcatatgtcaaaatgctaaactctcgagctcagcccattagcactggtttaagcattccatctctgagtgttggacatactgatgtaaatggaatccaaatatcgttctcccagtaccccatggactcagagaagatgcctcagatgcagcaacagacaaataatgtagactttatggacctcgattataagccccctctttgcaatgtttcccaagcagatggagtaatggcattaacagaaagaggttcgtccaacaattttcagggaccaacaggattgatgcgctaccattcggcgcccagctcatttttttcaagtctaggagaagaggaaaataataacattatatcagagtatttctctggtaattcttcgaatccactgcaatcaaataccaaaccactgcagcaaaatcaacctagtatattgagttttcatctcagggaaaatgaaccagcaaagcatcttggcgaacgcaatgaaatatctgaaaaagaaatgcacgccagctcccttccctcaaaagaagtgcagggaaatgtttctagagaagatctaggcaagcaccatcctcttgatgcaatccttgagaatgtaccggatgtatcccaagacagttttggcacctctcaaatgtcattgatgagccaagttcaagtttctgaaccaagtggacaacacatcgattcatcctaccaaatgaattcagtttgctgcgatacccttgatcagtcaggaggaaggatgggcaatgcatactcctcaacatccaagaatacacttattcgacatagtagctccccagctgggctactctctgaactagttgctgaaggccgaggtacttttgaaagtggtttcatggagggaacagtcagaaatagtattggtgtgggaaactcatgtggggatatcattataccaaatagagttcaaagacaaatgaaccgtttgcagcagaatagttctcctggactattatcccaactatctgtggatatgagtgtaccagaaatggttgacaggctcaacatggctatggttggatcttctgcagaaaatcaagctgggagcagttccgatgatagtagtttaggtagtgggaatgctggacaaggatatatttcaaatttctctgttaagtcatgggatgacgaggcaatgactcctggaaattttgcaggaatgcaaaatggggctaactttacagcaagaaagcgtgcaaaagaattggatatgaaattaatgcaaggcttgaataactcagatcaccagaaggtagaaggaggaattcgaggtgcatctgcattaacaaatcatccatacaatttgccaagatccacatcttcagaacttgcaatggaagaattcctgcaagatgctgttccatgcaaggtccgggcaaaaagaggctgtgcaacgcacccacggagcattgctgaaagggttcgaagaacacgaatcagtgaaagaatgagaaaactgcaggaacttgtgccaaacagtgacaagcaaacagtaaatattgccgacatgttagatgaggccgttgaatatgtcaagtctcttcagaagcaggtccaggaacttgcggaaaatcgagccaagtgtacctgcacacataatccggattgtgcatacaaaacataa

SEQ ID NO: 198 - protein, 551 aa, Pinus taeda
  G3782 polypeptide  Orthologous to G3086
MSYVKMLNSRAQPISTGLSIPSLSVGHTDVNGIQISFSQYPMDSEKMPQMQQQTNNVDFMDLDYKPPLCNVSQADGVMALTERGSSNNFQGPTGLMRYHSAPSSFFSSLGEEENNNIISEYFSGNSSNPLQSNTKPLQQNQPSILSFHLRENEPAKHLGERNEISEKEMHASSLPSKEVQGNVSREDLGKHHPLDAILENVPDVSQDSFGTSQMSLMSQVQVSEPSGQHIDSSYQMNSVCCDTLDQSGGRMGNAYSSTSKNTLIRHSSSPAGLLSELVAEGRGTFESGFMEGTVRNSIGVGNSCGDIIIPNRVQRQMNRLQQNSSPGLLSQLSVDMSVPEMVDRLNMAMVGSSAENQAGSSSDDSSLGSGNAGQGYISNFSVKSWDDEAMTPGNFAGMQNGANFTARKRAKELDMKLMQGLNNSDHQKVEGGIRGASALTNHPYNLPRSTSSELAMEEFLQDAVPCKVRAKRGCATHPRSIAERVRRTRISERMRKLQELVPNSDKQTVNIADMLDEAVEYVKSLQKQVQELAENRAKCTCTHNPDCAYKT

SEQ ID NO: 199 - DNA, 918 bp, Zea mays
  G3794 Predicted polypeptide sequence is orthologous to G1792
attacttgtgcacttgggtgcagtgcctgcagtataatcaagttagggtttaaaagaacctcgaccgcgatcgtatatagatccagattatcattagttattagaccactgtgatatcgatggacgacggcggcgagccaaccaagtaccgcggcgtgcggcgccggccgtcggggaagttcgccgccgagatccgcgactccagccggcagagcgtgcgcatgtggctgggcaccttcgacacggccgaggaggccgcaagggcgtacgaccgcgcggcctacgccatgcgcggccaaatcgccgtgctcaacttccccgccgaggcgcgcaactacgtgcgcggcgggtcgtcgtcgtcccgccagcagcagcagggaggaggaggaggaggaggaagtggcggcggcgccggtcagcaggtgatcgagctggagtgcctggacgatcaggtgctgcaggagatgctcaagggcggcgacgggaaaaaatagttgttagcgtatctgatcacaggtgcacgtgttgaaactgattatgaccaggcgatcgatcccatcttgtgcatgcggcctgccaaagttgctgggtcttctcatcgacctatatatatatgcttctcgatccatatatatatcataaatgcatgcagggtgcatgcatgtaccaagtttggaattataatgctcttggtgctgaattgaagtatactagtatatatagtgtgatccatgtattgaaaaggttgttttgcttaatcgcgtcatgattgcacacgtgcttgtttctgcttaaacaacccatatatatagccggctctggcctttgtcaagtctgcaatccttatacatcgttggtaattcatgcatgagttctatgtaactgcaatttagataaattgtagctaatataatagtc

SEQ ID NO: 200 - protein, 124 aa, Zea mays
  G3794 polypeptide  Orthologous to G1792
MDDGGEPTKYRGVRRRPSGKFAAEIRDSSRQSVRMWLGTFDTAEEAARAYDRAAYAMRGQIAVLNFPAEARNYVRGGSSSSRQQQQGGGGGGGSGGGAGQQVIELECLDDQVLQEMLKGGDGKK

SEQ ID NO: 201 - DNA, 760 bp, Capsicum annuum
  G3795 Predicted polypeptide sequence is orthologous to G1274
aaataatcccagtgcaaacatgcttgatgggagttttagatcattggactcacctgacagtgatgatttctcaaaccacctaattaactttgagctttctgatattctcgaaatagataattggcccattcaacaagatccgacactcataccccagtactcaaattatgcagcaaaccaagtggttaacaccagcagttaccaggaagaacctagcaacaacattggaagcagcagcagcaagaggaaagaagtaaaggacaaggttgctttcagaacgctatcacagattgaaatactagacgatggctataagtggagaaagtatggaaagaagatggtgaaaaatagtcccaacccgaggaattactataggtgctccgtagaaggttgtccagtgaagaagagagttgaacgagacaaagaggactctcggtatgtgataaccacctacgagggtgtccacaaccatcaaggtctatccccattctgattcctgtaacagagctcgagtttgaaagttactatgactcttgcacggtagctagctaaatcagggttctactgccagtaaattgaatcctgacagcttggcgagttcataaccaaacattgtggggtggtcagacggaggcatcgatctgtaacttaaaagtaatcgttagaacatttcgtgcccttcagttggcatgtagtcttatcctgcttcctacatgatttatatatcctacagcactatcaactaaaaaaaaaaaaaaaa

SEQ ID NO: 202 - protein, 157 aa, Capsicum annuum
  G3795 polypeptide  Orthologous to G1274
MLDGSFRSLDSPDSDDFSNHLINFELSDILEIDNWPIQQDPTLIPQYSNYAANQVVNTSSYQEEPSNNIGSSSSKRKEVKDKVAFRTLSQIEILDDGYKWRKYGKKMVKNSPNPRNYYRCSVEGCPVKKRVERDKEDSRYVITTYEGVHNHQGLSPF

SEQ ID NO: 203 - DNA, 712 bp, Lactuca sativa
  G3797 Predicted polypeptide sequence is orthologous to G1274
ggcataccaaaatgaattattatgatcatcaaatgtctaaagcctacagttacagatcagtagactcgcctgacatggactatgatgttccaaaccagcaaacttatgagtttgttgagagctttctcagctttgatgattggataactgaagataaagcatccactgttcctgagtatcaagatcatactcctgtttacccttctgccaccattgaagatggtggtctgtcgatcggaagtagcagcagcaacagccatcttcatgatggaagtagaagcagggccacaggatttgggcaggctcaaaatggcaaaaaagagaaagtcgccttcaaaacaaaatcccaagttgagatcctagatgacggttttaagtggaggaaatatggcaaaaagatggttaaaaacagtccaaacccaaggaattattatcgttgttcagcagcaggatgttcggtgaaaaagagagttgaaagggatgtagaggatgcacgatatgtaatcacaacctacgagggtattcacaaccaccaacgcccttctaactactgatagcttgtactacgatttgttaatgtatgctaaagaatagttgtttttctaagcttactccatcactagcttattgaaaagaaagttgtagttcggttacttattttcttcaaccgaccaaggttatgaatcgttttagaatataattgtttttaact

SEQ ID NO: 204 - protein, 180 aa, Lactuca sativa
  G3797 polypeptide  Orthologous to G1274
MNYYDHQMSKAYSYRSVDSPDMDYDVPNQQTYEFVESFLSFDDWITEDKASTVPEYQDHTPVYPSATIEDGGLSIGSSSSNSHLHDGSRSRATGFGQAQNGKKEKVAFKTKSQVEILDDGFKWRKYGKKMVKNSPNPRNYYRCSAAGCSVKKRVERDVEDARYVITTYEGIHNHQRPSNY

SEQ ID NO: 205 - DNA, 866 bp, Sorghum bicolor
  G3802 Predicted polypeptide sequence is orthologous to G1274
gcacgaggctgatacacaagcaaggcggctagctacagctagctggtgcgtgcagtgcatgcaaatggcggcttccctgggactgaaccctgaagctctcttcgcttcatactcgtctgcctactcctcctcctcgccgttcgtgtccgactacgcggcgagcttcccggcggccgtcgactccgccacggccttctccgcggagctcgatgaccttcaccacttcgactactcaccggcgccgatcttcacagctgtcggagccggggctggcggcgatcgcaacgagaagatgatgatgtggtgtgagggcggtggtgatgaaaagagactcagaagcagtggaaggatcgggttcagaacgagatcagaggtggagatcttggacgatggattcaaatggaggaagtatgggaagaaggctgtcaagaacagcccaaatccaaggaactactaccgctgctcgtcggagggctgcggcgtgaagaagcgggtggagagggaccgcgacgacccccgctacgtcatcaccacctacgacggcgtccacaaccacgccagtcccggagccgccgccatcatccagtacggcggcggcggcggcaatagcggcttctacagcccgccgcacagtggctcgccgtcggctgcctcatactcgggctccttcgtcttctgacttttccgggccttgaccttgacccagagtgatttacctttaccccagtcgtaggatgagaagagtgttcagagagatcagttcagcggccggctaaattccgacctgcttgtacatttttacacacttgtgcagtacaagtaataatatttaagctagaagcagtgtactctactttatttacctc

SEQ ID NO: 206 - protein, 206 aa, Sorghum bicolor
  G3802 polypeptide Orthologous to G1274
MQMAASLGLNPEALFASYSSAYSSSSPFVSDYAASFPAAVDSATAFSAELDDLHHFDYSPAPIFTAVGAGAGGDRNEKMMMWCEGGGDEKRLRSSGRIGFRTRSEVEILDDGFKWRKYGKKAVKNSPNPRNYYRCSSEGCGVKKRVERDRDDPRYVITTYDGVHNHASPGAAAIIQYGGGGGNSGFYSPPHSGSPSAASYSGSFVF

SEQ ID NO: 207 - DNA, 643 bp, Glycine max
  G3803 Predicted polypeptide sequence is orthologous to G1274
gtctttgcaagtgacacatatctagctattacctcaatggattactattttggaaaccctaatcctaaaccttatgataaccgtcactctgccgtagtaaacacggaatctccttcctccgagttcatgctatctgattatctcgtgttggaagatgctgtcgataatcaagagtcttggtcacaaagcactgaaactgaatcatcggagaaaggaaactccagcgatgtcagtcatgggtttggtgatgcaaccttcagcaacaccaacatgcatataaagtgcgaaaataatgggataaagcgaaagaaggaagaagtgagtcaaatgatcacgtttagaaccagatcgcagcttgaggttatggatgatggatataaatggaggaaatacggaaagaagacagtgaagaacaatcccaacccaaggaactactacaagtgttcaggtgaaggatgcaatgtgaagaaaagggtggaaagagacagggatgactcgaactatgttttaacaacgtacgacggtgtccacaatcatgagagcccgtcgactgcctactacagccaaattcccttggtgcattctaaccatgattggccccagctgcacccttctgcaaactcatgatcctcttcaatacagt

SEQ ID NO: 208 - protein, 196 aa, Glycine max
  G3803 polypeptide Orthologous to G1274
MDYYFGNPNPKPYDNRHSAVVNTESPSSEFMLSDYLVLEDAVDNQESWSQSTETESSEKGNSSDVSHGFGDATFSNTNMHIKCENNGIKRKKEEVSQMITFRTRSQLEVMDDGYKWRKYGKKTVKNNPNPRNYYKCSGEGCNVKKRVERDRDDSNYVLTTYDGVHNHESPSTAYYSQIPLVHSNHDWPQLHPSANS

SEQ ID NO: 209 - DNA, 823 bp, Zea mays
  misc_feature (9)..(9): n is a, c, g, or t
  misc_feature (802)..(802): n is a, c, g, or t
  G3804 Predicted polypeptide sequence is orthologous to G1274
ccggccggngatattcaggcaggcgcattgactggtacgcatacaactacaagcaaggcggctagctacagcggctagtgcgcgcgtggtgcaggcgcagctagctagtgcgtgcaatggcgacttcgctgggactgaaccctgaagatctcttcacttcgtactcgtcttcctactactcctcgccgccgttcatgtccgactacgcggcgagcttcacgccggcgggcggggactccacggccttctcctcggagctcgacaaccttcaccacttcgactactcaccggcgccgatcgtcactgctgccggagccggggctgggggcggcgatcgcaacgagaagatgatgtggtgtcagggtggtggtgacgagagaagactcagaagcaacggaaggatcgggttcagaacgaggtcacaggtggagatcttggacgacggattcaagtggaggaagtacgggaagaaggccgtcaagaacagcccaaatccaaggaactactaccgctgctcgtcggagggctgcggcgtgaagaagcgggtggagagggaccgcgacgacccccgctacgtcatcaccacctacgacggcgtccacaaccacgccagccccgcagccgctgctatcatcgtcccgtacggcaacggcggcggcaatagcggcttctacagcccgccgcacagcggctccccgtcggccacctcctactcgggctccctagtcttctgacttttccgggccttgacccatagttacctttacaccccagtcgtcggatgagaagaatcttcagcggncggctaaacagtctcaactgc

SEQ ID NO: 210 - protein, 205 aa, Zea mays
  G3804 polypeptide  Orthologous to G1274
MATSLGLNPEDLFTSYSSSYYSSPPFMSDYAASFTPAGGDSTAFSSELDNLHHFDYSPAPIVTAAGAGAGGGDRNEKMMWCQGGGDERRLRSNGRIGFRTRSQVEILDDGFKWRKYGKKAVKNSPNPRNYYRCSSEGCGVKKRVERDRDDPRYVITTYDGVHNHASPAAAAIIVPYGNGGGNSGFYSPPHSGSPSATSYSGSLVF

SEQ ID NO: 211 - DNA, 1368 bp, Glycine max
  G3810 Predicted polypeptide sequence is orthologous to G922
atgatgtcactttcacctagcttaggttctcccaacaatctcttgtttagggaaatgaaatccgaggaaaggggtttgtacttgatccatttgttgctcacttgtgcaaaccatgtagctgctggtaaccttgaaaatgcaaacaccacacttgagcaaatttccatgcttgcttcccctgatggggacactatgcagcgaatcgcaacatattttatggagtcgcttgctgatcggattcttaaaacatggcctgggatccacagagccctcaactcaaccagaatgactttgatatccgacgaaattctggttcagaagcttttctttgagcttttccctttcttgaaggtagcatttgttctcacaaatcaggccatcattgaagcaatggaaggggagaaagtgattcacataattgatctcaatgctgctgaagctgctcagtggattgctctccttcgagtattaagtgcgcatcccgaaggccctcctcatttgagaatcaccggggttcatcagaaaaaggagattctggatgaggtggctcatagactaactgaagaagcagaaaagttggatataccgttccaattcaaccctgtggcaagcaaattagaaaatcttgattttgacaaacttcgggtgaaaactggggaggcactagcaataagttccattctccaattgcatacccttttggcctgggatgatgaagccatgcagagaaagtctcctcttctgttaaaaagctcaaatggaattcacctgcaaagagttctgccaatgggccaaagcacattgggtgatttgcttgagaaagatatggttaatgggtacactccaagtcctgactcaacctcatcatctccatcatctttaactacttccaattcaaggcccagggggcgctttcttaatgccttgtggggattatcaccaaaggtcatggttgtgacagaacaagactgtaatcacaatggtccaactctgatggataggcttcttgaagctctatactcttatgcagcattgtttgattgtttggaatccactgtctcaagaacatcattggagagattaagggtggagaagatgctttttggggaggaaataaagaacatcattgcatgtgagggatctgaacgaaaggaaagacatgaaaagctggaaaagtggttccagagatttgatctagctgggtttggcaacgtgcctttgagctactttggtatggtgcaagcaaggaggttcctgcagagctatggttgtgaaggatacagaatgagggatgaaaatggttgtgtgttaatttgctgggaggatcggccaatgtattcaatatcagcttggagatctaggaagtaa

SEQ ID NO: 212 - protein, 455 aa, Glycine max
  G3810 polypeptide  Orthologous to G922
MMSLSPSLGSPNNLLFREMKSEERGLYLIHLLLTCANHVAAGNLENANTTLEQISMLASPDGDTMQRIATYFMESLADRILKTWPGIHRALNSTRMTLISDEILVQKLFFELFPFLKVAFVLTNQAIIEAMEGEKVIHIIDLNAAEAAQWIALLRVLSAHPEGPPHLRITGVHQKKEILDEVAHRLTEEAEKLDIPFQFNPVASKLENLDFDKLRVKTGEALAISSILQLHTLLAWDDEAMQRKSPLLLKSSNGIHLQRVLPMGQSTLGDLLEKDMVNGYTPSPDSTSSSPSSLTTSNSRPRGRFLNALWGLSPKVMVVTEQDCNHNGPTLMDRLLEALYSYAALFDCLESTVSRTSLERLRVEKMLFGEEIKNIIACEGSERKERHEKLEKWFQRFDLAGFGNVPLSYFGMVQARRFLQSYGCEGYRMRDENGCVLICWEDRPMYSISAWRSRK

SEQ ID NO: 213 - DNA, 1563 bp, Glycine max
  G3811 Predicted polypeptide sequence is orthologous to G922
gaattcggctcgaggttatcttctgtaacttcttcacctcttcagttcttttccatgatgtctctgtcagtttcacctagcttaggatctccctaccatatgaaatgcgagcttaggggtttggtattaatccatttgttgctcgctggtgctaattttgtagccaccggtgatttacaatatgcatacctcacacttgagcagatttcccagcatgcctctcttgatggggatactatgcagcgaattgcttcttatgtttctgaagcactcgctgatcggatacttaaaacatggcctggcatccacagggccctcaattccagcagaataactatggtttctgatgaaattcttgttcaaaagctcttctttgagcttttacccttcctcaagttctcatatatcctcactaatcaggctattgttgaagccatggaaggggagaaaatggtgcatatagttgatctctatggggccggaccggcacagtggatttctctcctccaagttttgagtgcacgtcctgaaggtcctccccatttgagaatcaccggggtccatcacaagaaagaggttctggatcagatggctcataaactcactgaagaggcggaaaagttggatatcccattccaattcaaccctgtgctaagcaagttggaaaatcttgatttcaacaaacttcgcgttaaaactggggaggcactggcaataagttctattatgcagttgcactcccttttggccttggatgaagatgcctcgcggagaaaatcgcctcttttgtcaaaaaactcaaatgcaattcacctgcagaaaggcctcctcatgaaccataacacactgggagatttgcttgacggctatagcccgagtcctgattcggcctcatcctcaccagcagcgtcttcatctgctttgatgaattcggagagctttcttaatgccttgtgggggttatccccaaaagtcatggttgtaactgaacaagactttaaccacaactgtttgaccatgatggagagactggcagaagctctattttcttatgctgcatattttgattgcttggagtccacggtctcaagagcatccatggacagattaaaacttgagaagatgctttttggcgaggagataaagaacatcatagcttgtgaaggatgtgaaagaaaagaaaggcacgaaaagatggataggtggatccagagacttgacttatctggatttgcaaacgtgcctataagctattatgggatgctgcagggaaggaggttcttgcagacctatggttgtgaggggtacaagatgagggaggaatgtggtcgggtgatgatatgctggcaggagcgatccttgttttccataacagcttggagaccaaggaagtaagataaagaagaaaattagtcatgtagtaatggatagagtctctttttttaagtttttcttttcttttctttgtttctaattgtatgacagagttttaccaatgtggtaatgactagtaatgaagagatacttctatttccttaaaaaaaaaaaaaaaagggcggccgc

SEQ ID NO: 214 - protein, 446 aa, Glycine max
  G3811 polypeptide  Orthologous to G922
MMSLSVSPSLGSPYHMKCELRGLVLIHLLLAGANFVATGDLQYAYLTLEQISQHASLDGDTMQRIASYVSEALADRILKTWPGIHRALNSSRITMVSDEILVQKLFFELLPFLKFSYILTNQAIVEAMEGEKMVHIVDLYGAGPAQWISLLQVLSARPEGPPHLRITGVHHKKEVLDQMAHKLTEEAEKLDIPFQFNPVLSKLENLDFNKLRVKTGEALAISSIMQLHSLLALDEDASRRKSPLLSKNSNAIHLQKGLLMNHNTLGDLLDGYSPSPDSASSSPAASSSALMNSESFLNALWGLSPKVMVVTEQDFNHNCLTMMERLAEALFSYAAYFDCLESTVSRASMDRLKLEKMLFGEEIKNIIACEGCERKERHEKMDRWIQRLDLSGFANVPISYYGMLQGRRFLQTYGCEGYKMREECGRVMICWQERSLFSITAWRPRK

SEQ ID NO: 215 - DNA, 1329 bp, Oryza sativa (japonica cultivar-group)
  G3813 Predicted polypeptide sequence is orthologous to G922
atggtccaggacgaaggctcgtcgtcgtcggtgacatcctccccgctccacaacttctccaacatgccgctccacccggccgcggcggcgtcgcccacgccgccatggatggtgcgggagctgcgttccgacgagcgcgggctgtgcctcatccatctcctgctcaactgcgccgcggcggcggcggccgggcggcttgatgctgcgaacgccgcgctcgagcacatcgcgtcgctggcggcgcccgacggggacgccatgcagcgcgtggcggccgccttcgcggaggcgctggcgcggcgcgcgctgagggcgtggcctgggctgtgccgcgcgctgctcctgccccgcgcgtcgcccacgccggccgaggtcgctgccgcgcgccgccacttcctcgacctctgcccgttcctccgcctcgccggcgccgccgccaaccagtcgatactggaggccatggagtccgagaagatcgtgcacgtcatcgacctcggcggcgccgacgccacgcaatggctggagctcctccacctcctcgccgcgcgccccgagggcccgccgcacctgcgcctcacgtcggtgcacgagcacaaggaactcctcacccagacagccatggcgctcacgaaagaagcagagcgcctcgacgtgccgttccagttcaacccggtggtgtcccgcctcgacgccctcgacgtggagtccctccgcgtgaagaccggcgaggccctcgccatctgctccagcctccagctgcactgcctcctggcgtccgacgacgacgccgccgccgtggcgggcggcgacaaggagaggcggagcccggagtccgggctgtcgccgtcgacgtcgcgcgcggacgcgttcctgggcgcgctgtgggggctgtcgccgaaggtgatggtggtggcggagcaggaggcgagccacaacgcggcggggctgacggagaggttcgtggaggcgctcaactactacgcggcgctgttcgactgcctggaggtgggggcggcgcgcgggtcggtggagcgcgcgcgcgtggagcggtggctgctcggggaggagatcaagaacatcgtggcgtgcgacggcggcgagcggcgggagcggcacgagcggctggagcggtgggcgcggcggctggagggcgccggcttcggccgcgtcccgctcagctactacgcgctgctccaggcgcggcgggtggcgcagggcctcggctgcgacggcttcaaggtccgggaggagaagggcaacttcttcctctgctggcaagatcgcgccctcttctccgtctccgcatggcgcggccgccgcttcgactga

SEQ ID NO: 216 - protein, 442 aa, Oryza sativa (japonica cultivar-group)
  G3813 polypeptide  Orthologous to G922
MVQDEGSSSSVTSSPLHNFSNMPLHPAAAASPTPPWMVRELRSDERGLCLIHLLLNCAAAAAAGRLDAANAALEHIASLAAPDGDAMQRVAAAFAEALARRALRAWPGLCRALLLPRASPTPAEVAAARRHFLDLCPFLRLAGAAANQSILEAMESEKIVHVIDLGGADATQWLELLHLLAARPEGPPHLRLTSVHEHKELLTQTAMALTKEAERLDVPFQFNPVVSRLDALDVESLRVKTGEALAICSSLQLHCLLASDDDAAAVAGGDKERRSPESGLSPSTSRADAFLGALWGLSPKVMVVAEQEASHNAAGLTERFVEALNYYAALFDCLEVGAARGSVERARVERWLLGEEIKNIVACDGGERRERHERLERWARRLEGAGFGRVPLSYYALLQARRVAQGLGCDGFKVREEKGNFFLCWQDRALFSVSAWRGRRFD

SEQ ID NO: 217 - DNA, 1554 bp, Oryza sativa (japonica cultivar-group)
  G3814 Predicted polypeptide sequence is orthologous to G922
atgttccaggacgacatgctgtcgtcggcgacgtcatcgccggcgtcgtcggtgtactcgccgtcgccgtcgccgtcgaacgggtcgtgggtgcaggagctgagccatgaccagcagagcgttcggctgatcggcctgctttaccagtgcgccgccgaggtgtccgccggctccttcgaccgcgccaacctctgcctcgagcacatcacgcagctcgcgtccctggacgcgccgcacgcgctccagcgcctcgccgccgtcttcgccgacgcgctcgcgcgcaagctgctcaacctcatcctgggcctctcgcgcgcgctgctgtcgtcggccaactccgccgacgcccacctcgtccccgtcgcgcgccgccacatgttcgacgtgctcccgttcctgaagctcgcgtacctgaccaccaaccatgccatccttgaggcaatggagggggagaggttcgtccacgtcgtcgacttctccggcccggcggcgaacccggtgcagtggatcgcgctgttccacgcgttccgaggccgccgggaaggcccgccgcacctccgcatcaccgccgtccacgacagcaaggagttcctcgcgaacatggccgcggtgctgtccaaggaggcggaggcgttcgacatcgcgttccagttcaacgccgtggaggcgaagctcgacgagatggacttcgacgcgctccgccacgacctcggcgtcaggtccggcgaggcgctcgccgtcagcgtcgtgctgcagcttcaccgcctcctcgccgtcgacgacgggaggaggcacgccgccgccggctgcctcaccccggtccagatcatcgcgcgctccagcccgagaagcttcggcgagctgctggagcgggagctgaacacgcggctgcagctgagccccgacgcgtccgtggtgtcgtcgctgtcaccccactcccccgcagcagcaacggcggcgcacccgacgacgtcgacgccaaagctggggagcttcctgtcggcggtgaggtcgctgtccccgaagatcatggtgatgacggagcaggaggcgaaccacaacggcggcgcgttccaggagcggttcgacgaggcgctcaactactacgcgtcgctgttcgactgcctgcagcggagcgcggcggcggcggcggagcgcgcgcgcgtggagcgggtgctgctcggggaggagatccgcggcgtggtggcgtgcgagggggcggagcgggtggagcggcacgagcgggcgcggcagtgggcggcgcggatggaggcggccggcatggagcgggtggggctgagctacagcggcgccatggaggcgaggaagctgctgcagagctgcgggtgggcggggccgtacgaggtgaggcacgacgccggcggccatggcttcttcttctgctggcacaagaggccgctctacgccgtcacggcgtggcgcccggcggcgtcgcgacgcggccacactcttcatggccgaagatccgagggaacacgggagtctgtcccttggcctcccagaagtagacgtcggtgtggcagagcgaggtga

SEQ ID NO: 218 - protein, 517 aa, Oryza sativa (japonica cultivar-group)
  G3814 polypeptide  Orthologous to G922
MFQDDMLSSATSSPASSVYSPSPSPSNGSWVQELSHDQQSVRLIGLLYQCAAEVSAGSFDRANLCLEHITQLASLDAPHALQRLAAVFADALARKLLNLILGLSRALLSSANSADAHLVPVARRHMFDVLPFLKLAYLTTNHAILEAMEGERFVHVVDFSGPAANPVQWIALFHAFRGRREGPPHLRITAVHDSKEFLANMAAVLSKEAEAFDIAFQFNAVEAKLDEMDFDALRHDLGVRSGEALAVSVVLQLHRLLAVDDGRRHAAAGCLTPVQIIARSSPRSFGELLERELNTRLQLSPDASVVSSLSPHSPAAATAAHPTTSTPKLGSFLSAVRSLSPKIMVMTEQEANHNGGAFQERFDEALNYYASLFDCLQRSAAAAAERARVERVLLGEEIRGVVACEGAERVERHERARQWAARMEAAGMERVGLSYSGAMEARKLLQSCGWAGPYEVRHDAGGHGFFFCWHKRPLYAVTAWRPAASRRGHTLHGRRSEGTRESVPWPPRSRRRCGRAR

SEQ ID NO: 219 - DNA, 1401 bp, Lycopersicon esculentum
  G3824 Predicted polypeptide sequence is orthologous to G922
tggagataccatgcaaaggattgcttcatattttactgaggctttagctgataggattctaaggagttggcctggtctttataaggcgttgcgttcgactaagttatcggttgtctcagaagaaattcttgttaggaagatgtttttcgagatctttcctttcttgaaggtggcgtttgtggtcacaaatcaagctataattgaagctatggaaggtgaaaagatggttcatattgtggatcttaatgctgctgaacccctgcaatggcgtgcgttgcttcaggacttgagcgcgcgtcctgaaggaccgccccatctgcgcattactggggttcatcagcaaaaagaggtgttagatcaaatggcacatgtgcttactcaagaagcagaaaaactggatatcccttttcagttcaatcaagtagttagcagattggaaaatcttgatgttgagaaacttcgcgtgaaaacgggggaggctcttgcgattagttcaattatgcaattgcacacccttctagcccatgataatgacaagaagtcccctttgccttttaagcattcaaatggtgttaacttaaacagggcactagtcaaccaaaatactttaggggaatttcttgaaaaagatatggctaatggttgcagtccaagcaatgacaccgcttcttcatccccgctatgttcaactggttcaacaaagatggatagtttcctcaatgctttgtggggtttatcaccaaaagttatggtggtaacagaacaagatgctaaccataatgggacaactcttatggagaggctatcagagtcgttacatttttatgctgcattatttgattgtcttgaatcgacgctgccaagaacatcattagagagattaaaggtggaaaagatgttattaggtgaagagattagaaacattatagcatgtgaagggatcgaacgaaaggagaggcatgaaaagctcgaaaagtggttccaaagattcgacacatctggttttgggaatgtgcctttgagttattatgctatgttgcaggcaagaaggttgttgcagagttacagttgtgaaggatacaagatcaaagaagataatggttgcgtggtgatatgctggcaggatcgcccacttttctcagtgtcgtcttggcgatgtaggaagtgagactaaacttagttttcattgtaatgttttagatttgtatcttccttttgttgttgtaacataatgtgtagaactccagttggtgaaactgctattgacatgtttgagacattttgtcaacttttttgatctcatgtgataagcttctctctagtgtttagatttccattttgatatggatcaataaagctgatgttctcttaaaaaaaaaaaaaaaaaactcgagactagga

SEQ ID NO: 220 - protein, 385 aa, Lycopersicon esculentum
  G3824 polypeptide  Orthologous to G922
MQRIASYFTEALADRILRSWPGLYKALRSTKLSVVSEEILVRKMFFEIFPFLKVAFVVTNQAIIEAMEGEKMVHIVDLNAAEPLQWRALLQDLSARPEGPPHLRITGVHQQKEVLDQMAHVLTQEAEKLDIPFQFNQVVSRLENLDVEKLRVKTGEALAISSIMQLHTLLAHDNDKKSPLPFKHSNGVNLNRALVNQNTLGEFLEKDMANGCSPSNDTASSSPLCSTGSTKMDSFLNALWGLSPKVMVVTEQDANHNGTTLMERLSESLHFYAALFDCLESTLPRTSLERLKVEKMLLGEEIRNIIACEGIERKERHEKLEKWFQRFDTSGFGNVPLSYYAMLQARRLLQSYSCEGYKIKEDNGCVVICWQDRPLFSVSSWRCRK

SEQ ID NO: 221 - DNA, 1269 bp, Oryza sativa (japonica cultivar-group)
  G3827 Predicted polypeptide sequence is orthologous to G922
atgatcacgtttgggttgaactcccgcccccatccggagttccggaacgacctccgcccatcgtcatcgtcacttgccgccggcgaaagtgagtccccaaaggcggtggagaggctggagagagagggatgtaccagatctggaagctcccgccgtcagccgcgccgaggtgcggcagccgctctggccgtagccagcgccccttcactcgcgagttgttgtcgtcgcccctccatccgcaagctgctgtcgttgccgctccacgctcgcccggtgccgccgccaggctccgggatgcggcagccgctccgcccgtcgccggcggccctccacccacgaggtgctgccgtcgcccctacgcgctcgcctggtgccgccgtcgccggcgctgagatgcggcagcaggtgagctactgctggcgccctgtccgcccgccaccggcgggtggggaggaggctggcggggagctcctcctgcgcggccgcgagctcctgctgctgcagctgctgctaatttatctcgtgtgggacggagggacgctgctcctccttgagctgagcattttcttccttctcttttgttcacttgtgacggccatggcgctcacgaaagaagcagagcgcctcgacgtgcccttccagttcaacccggtggtgtcccgcctcgatgccctcgatgtggagtccctccgcgggctgtcactgaaggtgatggtggtgacggagcaggaggtgagccacaacgcggcggggctgacggagcggttcgtggaggctctcaactactacgcggcgttgttcgactgcctggaggtgggcggggcgcgcgggtcggtggagcgcacgcgcgtggagcggtggctactcggggaggagatcaagaacatcgtggcgtgtgacggcggcgagcggcgggagcggcacgagcggctggagggcgccggctttggccgcgtcccgctcagctactacgcgctgcttcaggccaggcgggtggcgcagggtctcggctgcgacggcttcaaggtccgggaggagaagggcaacttcttcctctgctggcaagatcgcgccctcttctccgtctccgcatggcgcggccgccgcttcgccgccttgctccccttgccgccatcgacgcctctcccctgctcccgcgtcattgctaccttgctctcctccccgccgccgccttgctctcctctccatccgtactgcccagagcggagagagaggatgaagggagagaagaagggaaagagagagtag

SEQ ID NO: 222 - protein, 422 aa, Oryza sativa (japonica cultivar-group)
  G3827 polypeptide  Orthologous to G922
MITFGLNSRPHPEFRNDLRPSSSSLAAGESESPKAVERLEREGCTRSGSSRRQPRRGAAAALAVASAPSLASCCRRPSIRKLLSLPLHARPVPPPGSGMRQPLRPSPAALHPRGAAVAPTRSPGAAVAGAEMRQQVSYCWRPVRPPPAGGEEAGGELLLRGRELLLLQLLLIYLVWDGGTLLLLELSIFFLLFCSLVTAMALTKEAERLDVPFQFNPVVSRLDALDVESLRGLSLKVMVVTEQEVSHNAAGLTERFVEALNYYAALFDCLEVGGARGSVERTRVERWLLGEEIKNIVACDGGERRERHERLEGAGFGRVPLSYYALLQARRVAQGLGCDGFKVREEKGNFFLCWQDRALFSVSAWRGRRFAALLPLPPSTPLPCSRVIATLLSSPPPPCSPLHPYCPERRERMKGEKKGKRE

SEQ ID NO: 223 - DNA, 2217 bp, Arabidopsis thaliana
  misc_feature (2192)..(2192): n is a, c, g, or t
  G175 reference sequence; predicted polypeptide sequence is paralogous to G1274
atttctaaaaatagttaaactgttggtgatttttgtggaactgattaattaacacaattggagaaaacaaattgaaacttttttgtttgttagagagttaaggagaaattttatctaaccaagctgtgtaaatctcttgtagtttttctgccgatatacattttcattgtgttgagggtaaacgataatcaagaacgagagagagagagagcaagagcaagagatttctactacagaagatttattatattgatcattttgtgtgatcaacccataaaaacagagagacatagacaagtccatgtttcgatgtttcgatctctcttactgtctaaacggcgaaataaaaagtctgatgggtgtcacttattgcatgtatattagtaaatcagcttgagcccaagttaaagctgaaacttgggtttgcaatggctggtattgataataaagctgctgtaatgggagaatggttcgactgtagtactactaaccacaggaagagatcgaaagcggaacttggtagagagttttctttaaattacatcaagaatgaggattctttgcaaaccacctttcaagaaagttcacgaggagctcttcgtgaaaggattgctgcgagatccgggtttaatgcaccgtggttaaacactgaggatattcttcagtcgaaatctttaaccatctcttctcctggtcttagtcctgcaactctgttagagtctcctgttttcctctcaaaccctttgctatctccaacaaccgggaagctctcatcagtaccttctgataaggctaaagctgagttatttgacgacattaccacatccttagccttccaaaccatttcaggaagtggccttgatcctactaacatcgctttagaacccgatgattcccaagactatgaagaaagacagctcggcggtttaggagactcgatggcttgttgtgcacctgcagatgatggatacaactggagaaaatatggacaaaagctagttaaaggaagtgagtatccgcggagctattacaagtgcacgcacccgaattgtgaggccaagaagaaggttgaacggtctcgggaaggtcatattatagagatcatatacacaggagatcatatacacagcaaacctccacctaaccgccggtcagggattggatcatccggtactggccaagacatgcaaatagatgcaaccgaatacgaaggttttgctggaaccaatgagaacatagaatggacatcacctgtatctgcagagctcgaatacggaagccattcaggatcaatgcaggttcaaaacgggactcatcagttcgggtatggtgatgcagcagctgatgccttatatagagatgaaaacgaagatgatcgcacgtcccacatgagtgtttccctgacttacgatggagaggtagaagagtccgaatcaaagagaaggaaactagaagcttatgcaacagaaacgagtggatcaaccagagccagccgtgagccaagagttgtggtgcagaccacaagtgacattgacatcctcgatgatggttatcgctggcgcaagtatgggcaaaaagtcgttaaaggaaacccgaatccaaggagctactataaatgcacagctaatggatgtaccgtaacgaagcatgtagagagagcctctgatgacttcaagagcgtactaacaacttatataggcaagcacacccacgttgtaccagcagcacgcaacagcagccacgtcggtgcaggcagttcagggactctccaaggcagtttagcgactcagacccacaaccacaatgtgcactatccaatgccacacagtagatctgagggactggccacagccaactcatctctatttgacttccagtcacacctgaggcatcctacaggtttctccgtttacataggccaatctgagctttctgatctttcaatgcctggtctaactattgggcaagagaagcttaccagcctgcaggcgcctgacattggggatccaactggcctaatgttgcagttagcagcacagccgaaggtggaaccagtgtcaccacaacagggacttgatttgtcagcgagctcattgatatgcagagagatgttgagtagattacgacagatatgaaacaaatctctttgttcactgattgctcaaatttttgaataaatgaaaaattgaganaaaaaaaaaaaaaaaaaaaaaaaaa

SEQ ID NO: 224 - protein, 568 aa, Arabidopsis thaliana
  G175 polypeptide reference sequence; paralogous to G1274
MAGIDNKAAVMGEWFDCSTTNHRKRSKAELGREFSLNYIKNEDSLQTTFQESSRGALRERIAARSGFNAPWLNTEDILQSKSLTISSPGLSPATLLESPVFLSNPLLSPTTGKLSSVPSDKAKAELFDDITTSLAFQTISGSGLDPTNIALEPDDSQDYEERQLGGLGDSMACCAPADDGYNWRKYGQKLVKGSEYPRSYYKCTHPNCEAKKKVERSREGHIIEIIYTGDHIHSKPPPNRRSGIGSSGTGQDMQIDATEYEGFAGTNENIEWTSPVSAELEYGSHSGSMQVQNGTHQFGYGDAAADALYRDENEDDRTSHMSVSLTYDGEVEESESKRRKLEAYATETSGSTRASREPRVVVQTTSDIDILDDGYRWRKYGQKVVKGNPNPRSYYKCTANGCTVTKHVERASDDFKSVLTTYIGKHTHVVPAARNSSHVGAGSSGTLQGSLATQTHNHNVHYPMPHSRSEGLATANSSLFDFQSHLRHPTGFSVYIGQSELSDLSMPGLTIGQEKLTSLQAPDIGDPTGLMLQLAAQPKVEPVSPQQGLDLSASSLICREMLSRLRQI

SEQ ID NO: 225 - DNA, 1072 bp, Arabidopsis thaliana
  G303 reference sequence
aaaagataacgtagccattaacttttatgcattaactccttcatttctttttgtgctcgtttggttgagagagagagaggctatatatgatgttccaacaagattaccctcatggcttttcactcgtggaaacatccttaagttacgaaatgttggattactttcaaaacatcgtcgtttcgaactctgaagacgtggcgtcacagcaaaattccatttcgtcctcttcttattcatcagcgacactctcctgctccataacagagcaaaaatctcacttaactgaaaagttatctcctctacgagaaagatatggttgcggtgactttctgtcgcggaagaggagaaggagaagtgaaaaaacgattgtagataaagagaatcaaaggatgaatcacattgccgtcgagcgtaaccggagaaaacagatgaatcattttctgtctatcctcaagtctatgatgcctctctcttattctcaacctaatgaccaagcatcaatcatagaagggaccattagctatctgaagaagctagaacaacgtctccaatctctcgaagcccaattaaaagctactaaactcaatcaatcaccaaatatattttccgacttcttcatgttccctcaatactccaccgccactgccactgccaccgccactgcctcctcatcctcctcgagccaccaccatcacaagcgactagaggtggttgctgacgtggaggttacaatggtagaaagacatgccaacattaaagtgttaacgaagacacagccaagattgctcttcaagattatcaatgagtttaactctttaggtttaagtactcttcatctcaacctcacaacttccaaagacatgtctctcttcacttttagcgtcaaggtagaggcagattgtcaattgacgccttctggtaatgaggtcgcaaatacggtgcatgaagtcgttagaagagttcacaaggaacgttgaattttgtttacatactagctaactttgaaattctattttattgtataaacaatctcttatgtgtgtaatttacatatatacaattaattaacatt

SEQ ID NO: 226 - protein, 296 aa, Arabidopsis thaliana
  G303 polypeptide reference sequence
MMFQQDYPHGFSLVETSLSYEMLDYFQNIVVSNSEDVASQQNSISSSSYSSATLSCSITEQKSHLTEKLSPLRERYGCGDFLSRKRRRRSEKTIVDKENQRMNHIAVERNRRKQMNHFLSILKSMMPLSYSQPNDQASIIEGTISYLKKLEQRLQSLEAQLKATKLNQSPNIFSDFFMFPQYSTATATATATASSSSSSHHHHKRLEVVADVEVTMVERHANIKVLTKTQPRLLFKIINEFNSLGLSTLHLNLTTSKDMSLFTFSVKVEADCQLTPSGNEVANTVHEVVRRVHKER

SEQ ID NO: 227 - DNA, 628 bp, Arabidopsis thaliana
  G354 reference sequence
cctagaagtcactaagtcgattcaaaatggttgcgagaagtgaggaaattgtgatagtggaagaagatacgactgcgaaatgtttgatgttgttatcaagagtcggagaatgcggcggcggctgcgggggagatgaacgtgttttccgatgcaagacttgtcttaaagagttctcatcgtttcaagctttgggaggtcatcgtgcaagccacaagaaacttatcaacagtgacaatccatcacttcttggatccttgtccaacaagaaaactaaaacgtctcatccttgtccgatatgtggagtgaagtttccgatgggacaagctcttggtggtcacatgaggagacataggaacgagaaagtctcaggctcgttggttacacgttcttttctaccggagacgacgacggtgacggctttgaagaaatttagtagtgggaagagagtggcttgtttggatttggacttagattcgatggagagtttggtcaattggaagttggagttgggaagaacgatttcttggagttaagtttttgggttgtatacagtttcacatgattttgtaatctttgttgatccaattatcgtaccgatcgatgtgaatattattttgatacaataaaa

SEQ ID NO: 228 - protein, 168 aa, Arabidopsis thaliana
  G354 polypeptide reference sequence
MVARSEEIVIVEEDTTAKCLMLLSRVGECGGGCGGDERVFRCKTCLKEFSSFQALGGHRASHKKLINSDNPSLLGSLSNKKTKTSHPCPICGVKFPMGQALGGHMRRHRNEKVSGSLVTRSFLPETTTVTALKKFSSGKRVACLDLDLDSMESLVNWKLELGRTISWS

SEQ ID NO: 229 - DNA, 869 bp, Arabidopsis thaliana
  G489 reference sequence
tggtagtgaatggatcaacaagaccatggacagtctggagctatgaactatggcacaaacccataccaaaccaacccgatgagcaccactgctgctactgtagcaggaggtgcggcacaaccaggccagctggcgttccaccagatccatcagcagcagcagcagcaacagctggcacagcagcttcaagcattttgggagaaccaattcaaagagattgagaagactaccgatttcaagaaccacagccttccccttgcgagaatcaagaaaatcatgaaagcggatgaagatgtccgtatgatctcggctgaggcgccggtcgtgtttgcaagggcctgtgagatgttcatcctggagctgacactcaggtcgtggaaccacactgaggagaataagaggcggacgttgcagaagaacgatattgctgctgctgtgactagaaccgatatttttgatttccttgtggatattgttccccgggaggatctccgagatgaagtcttgggaagtattccgaggggcactgtcccggaagctgctgctgctggttacccgtatggatacttgcctgcaggaactgctccaataggaaatccgggaatggttatgggtaatcccggtggtgcgtatccacctaatccttatatgggtcaaccaatgtggcaacaacaggcacctgaccaacctgaccaggaaaattagcaagaaactgtgagtcttccagcttcttttaggcctaccttgtagtcttggggttttgtttctgttttcgaataatggtaacctttgtataacttatttcagtatcgtctcagtttggtactatgtcagttttggtattcttatcttattgaagtaaaaatgtg

SEQ ID NO: 230 - protein, 220 aa, Arabidopsis thaliana
  G489 polypeptide reference sequence
MNYGTNPYQTNPMSTTAATVAGGAAQPGQLAFHQIHQQQQQQQLAQQLQAFWENQFKEIEKTTDFKNHSLPLARIKKIMKADEDVRMISAEAPVVFARACEMFILELTLRSWNHTEENKRRTLQKNDIAAAVTRTDIFDFLVDIVPREDLRDEVLGSIPRGTVPEAAAAGYPYGYLPAGTAPIGNPGMVMGNPGGAYPPNPYMGQPMWQQQAPDQPDQEN

SEQ ID NO: 231 - DNA, 798 bp, Arabidopsis thaliana
  G634 reference sequence
atggagcaaggaggaggtggtggtggtaatgaagttgtggaggaagcttcacctattagttcaagacctcctgctaacaacttagaagagcttatgagattctcagccgccgcggatgacggtggattaggaggtggaggtggaggaggaggaggaggaagtgcttcttcttcatcgggaaatcgatggccgagagaagaaactttagctcttcttcggatccgatccgatatggattctacttttcgtgatgctactctcaaagctcctctttgggaacatgtttccaggaagctattggagttaggttacaaacgaagttcaaagaaatgcaaagagaaattcgaaaacgttcagaaatattacaaacgtactaaagaaactcgcggtggtcgtcatgatggtaaagcttacaagttcttctctcagcttgaagctctcaacactactcctcctcctcctccttctcatcctcacgctcatcaaccagaacagaaacaacaacaacaaccacaacaagagatggtcatgagctcggaacaatcatcattaccatcatcatcaagatggccaaaggcagagattctagcgcttataaacctgagaagtggaatggaaccaaggtaccaagataatgtacctaaaggacttctatgggaagagatctcaacttcaatgaagagaatgggatacaacagaaacgctaagagatgtaaagagaaatgggaaaacataaacaaatactacaagaaagttaaagaaagcaacaacagcaactacaacaacaagaatcaatga

SEQ ID NO: 232 - protein, 265 aa, Arabidopsis thaliana
  G634 polypeptide reference sequence
MEQGGGGGGNEVVEEASPISSRPPANNLEELMRFSAAADDGGLGGGGGGGGGGSASSSSGNRWPREETLALLRIRSDMDSTFRDATLKAPLWEHVSRKLLELGYKRSSKKCKEKFENVQKYYKRTKETRGGRHDGKAYKFFSQLEALNTTPPPPPSHPHAHQPEQKQQQQPQQEMVMSSEQSSLPSSSRWPKAEILALINLRSGMEPRYQDNVPKGLLWEEISTSMKRMGYNRNAKRCKEKWENINKYYKKVKESNNSNYNNKNQ

SEQ ID NO: 233 - DNA, 341 bp, Arabidopsis thaliana
  G682 reference sequence
acatggataaccatcgcaggactaagcaacccaagaccaactccatcgttacttcttcttctgaaggaacagaagtgagtagtcttgagtgggaagttgtgaacatgagtcaagaagaagaagatttggtctctcgaatgcataagcttgtcggtgacaggtgggaactgatagctgggaggatcccaggaagaaccgctggagaaattgagaggttttgggtcatgaaaaattgaaaagtgatcaatatatctctatagtttcactgattgtttcgattatattccgttgtattttaaatttaccaactctgttataagaagaaaactttcttaaatccc

SEQ ID NO: 234 - protein, 77 aa, Arabidopsis thaliana
  G682 polypeptide reference sequence
MDNHRRTKQPKTNSIVTSSSEGTEVSSLEWEVVNMSQEEEDLVSRMHKLVGDRWELIAGRIPGRTAGEIERFWVMKN

SEQ ID NO: 235 - DNA, 1797 bp, Arabidopsis thaliana
  G916 reference sequence
aaaaaaaaaaacaatctaagatatctatcaagatcttaagatatctacatttatagagatgtttcgttttccggtaagtcttggaggaggtccacgtgagaatctgaagccatcagatgagcagcatcaacgtgcggtggtgaatgaggttgactttttccgatcagcggagaagagagatagggtttcacgtgaagaacaaaacattatcgccgatgagactcatagggttcatgtcaaaagggagaattcacgtgttgatgatcatgacgatcgttctactgatcacatcaatattggacttaatcttctcactgcgaatacgggaagcgacgagtcaatggtggatgatggattgtctgtggatatggaagagaaacgtacaaagtgtgagaatgcacaacttcgcgaagagctaaagaaggcgagtgaagataatcaaagactaaagcaaatgctaagtcaaacaaccaacaacttcaattccttgcagatgcaacttgttgctgtcatgaggcaacaagaagatcatcatcacctagctacgaccgagaacaatgacaatgtaaagaaccgacatgaagtgcctgaaatggttccaagacagttcatcgatttgggaccgcattctgacgaagtgtcgtccgaggagaggacgacggttcggtcgggatctcctccctcgcttctagagaaatctagctcacgtcaaaacggaaagagagtgcttgtaagagaagaaagcccggaaaccgaatccaacggctggagaaaccctaacaaagttcctaaacaccatgcatcatccagcatttgcggtggcaatggcagtgaaaatgcaagtagcaaggtcattgagcaagcggccgccgaagccaccatgcgtaaagcccgtgtctcggttcgtgctcgatccgaagctcccatgttaagcgatggatgtcaatggagaaaatacggacaaaaaatggcgaaaggaaacccgtgccctcgagcttattaccgttgcacaatggctgttggatgtcctgttcgcaagcaagtgcaacgttgcgcggaagatagaaccattctcataacaacctacgaaggaaaccataaccatccattacctcctgcggctatgaacatggcttcaactacaacagcagccgcaagcatgcttctctcaggctccaccatgtcgaaccaagacggtttaatgaacccaacaaatctcttggctcgaaccatattaccgtgttcctcaagcatggctactatctcagcctctgcaccattcccaaccattacattagacctcacagagtcacccaacgggaacaatccaaccaataacccgctgatgcaattctctcaacggtctggtttggtggagttgaaccaatcggttttgcctcatatgatgggtcaggctttgtactacaaccaacagtctaagttttcgggtttacatatgccgtctcagccgctaaacgctggtgagagtgttagcgccgctactgccgcaatcgcctccaatcccaactttgccgcggctctagctgcagccataacttcgattatcaacggttcgaacaatcagcagaatgggaacaacaataacagtaatgttacaacgagcaacgttgacaataggcaataacatttttttataagttttagttagggactttttatcggtcgattttgttttgtttttcttttattacattattttttagttacggcttttttttgttttttcttttctttcccaaacaacaagtattgagagcaattcccccccccccccct

SEQ ID NO: 236 - protein, 528 aa, Arabidopsis thaliana
  G916 polypeptide reference sequence
MFRFPVSLGGGPRENLKPSDEQHQRAVVNEVDFFRSAEKRDRVSREEQNIIADETHRVHVKRENSRVDDHDDRSTDHINIGLNLLTANTGSDESMVDDGLSVDMEEKRTKCENAQLREELKKASEDNQRLKQMLSQTTNNFNSLQMQLVAVMRQQEDHHHLATTENNDNVKNRHEVPEMVPRQFIDLGPHSDEVSSEERTTVRSGSPPSLLEKSSSRQNGKRVLVREESPETESNGWRNPNKVPKHHASSSICGGNGSENASSKVIEQAAAEATMRKARVSVRARSEAPMLSDGCQWRKYGQKMAKGNPCPRAYYRCTMAVGCPVRKQVQRCAEDRTILITTYEGNHNHPLPPAAMNMASTTTAAASMLLSGSTMSNQDGLMNPTNLLARTILPCSSSMATISASAPFPTITLDLTESPNGNNPTNNPLMQFSQRSGLVELNQSVLPHMMGQALYYNQQSKFSGLHMPSQPLNAGESVSAATAAIASNPNFAAALAAAITSIINGSNNQQNGNNNNSNVTTSNVDNRQ

SEQ ID NO: 237 - DNA, 768 bp, Arabidopsis thaliana
  G975 reference sequence
attactcatcatcaagttcctactttctctctgacaaacatcacagagtaagtaagaatggtacagacgaagaagttcagaggtgtcaggcaacgccattggggttcttgggtcgctgagattcgtcatcctctcttgaaacggaggatttggctagggacgttcgagaccgcagaggaggcagcaagagcatacgacgaggccgccgttttaatgagcggccgcaacgccaaaaccaactttcccctcaacaacaacaacaccggagaaacttccgagggcaaaaccgatatttcagcttcgtccacaatgtcatcctcaacatcatcttcatcgctctcttccatcctcagcgccaaactgaggaaatgctgcaagtctccttccccatccctcacctgcctccgtcttgacacagccagctcccatatcggcgtctggcagaaacgggccggttcaaagtctgactccagctgggtcatgacggtggagctaggtcccgcaagctcctcccaagagactactagtaaagcttcacaagacgctattcttgctccgaccactgaagttgaaattggtggcagcagagaagaagtattggatgaggaagaaaaggttgctttgcaaatgatagaggagcttctcaatacaaactaaatcttatttgcttatatatatgtacctattttcattgctgatttacagccaaaataatcaattataccgtgtattttatagatgttttatattaaaaggttgttagatata

SEQ ID NO: 238 - protein, 199 aa, Arabidopsis thaliana
  G975 polypeptide reference sequence
MVQTKKFRGVRQRHWGSWVAEIRHPLLKRRIWLGTFETAEEAARAYDEAAVLMSGRNAKTNFPLNNNNTGETSEGKTDISASSTMSSSTSSSSLSSILSAKLRKCCKSPSPSLTCLRLDTASSHIGVWQKRAGSKSDSSWVMTVELGPASSSQETTSKASQDAILAPTTEVEIGGSREEVLDEEEKVALQMIEELLNTN

SEQ ID NO: 239 - DNA, 1116 bp, Arabidopsis thaliana
  G1069 Reference sequence; functionally related, homologous to G1073
ttggaaccctagaggcctttcaagcaaatcatcagggtaacaatttcttgatctttctttttagcgaatttccagtttttggtcaatcatggcaaacccttggtggacgaaccagagtggtttagcgggcatggtggaccattcggtctcctcaggccatcaccaaaaccatcaccaccaaagtcttcttaccaaaggagatcttggaatagccatgaatcagagccaagacaacgaccaagacgaagaagatgatcctagagaaggagccgttgaggtggtcaaccgtagaccaagaggtagaccaccaggatccaaaaacaaacccaaagctccaatctttgtgacaagagacagccccaacgcactccgtagccatgtcttggagatctccgacggcagtgacgtcgccgacacaatcgctcacttctcaagacgcaggcaacgcggcgtttgcgttctcagcgggacaggctcagtcgctaacgtcaccctccgccaagccgccgcaccaggaggtgtggtctctctccaaggcaggtttgaaatcttatctttaaccggtgctttcctccctggaccttccccacccgggtcaaccggtttaacggtttacttagccggggtccagggtcaggtcgttggaggtagcgttgtaggcccactcttagccatagggtcggtcatggtgattgctgctactttctctaacgctacttatgagagattgcccatggaagaagaggaagacggtggcggctcaagacagattcacggaggcggtgactcaccgcccagaatcggtagtaacctgcctgatctatcagggatggccgggccaggctacaatatgccgccgcatctgattccaaatggggctggtcagctagggcacgaaccatatacatgggtccacgcaagaccaccttactgactcagtgagccatttctatatataatggtctatataaataaatatatagatgaatataagcaagcaatttgaggtagtctattacaaagcttttgctctggttggaaaaataaataagtatcaaagctttgtttgttcttaatggaaatatagagcttgggaaggtagaaagagacgacatt

SEQ ID NO: 240 - protein, 281 aa, Arabidopsis thaliana
  Reference sequence; functionally related, homologous to G1073
MANPWWTNQSGLAGMVDHSVSSGHHQNHHHQSLLTKGDLGIAMNQSQDNDQDEEDDPREGAVEVVNRRPRGRPPGSKNKPKAPIFVTRDSPNALRSHVLEISDGSDVADTIAHFSRRRQRGVCVLSGTGSVANVTLRQAAAPGGVVSLQGRFEILSLTGAFLPGPSPPGSTGLTVYLAGVQGQVVGGSVVGPLLAIGSVMVIAATFSNATYERLPMEEEEDGGGSRQIHGGGDSPPRIGSNLPDLSGMAGPGYNMPPHLIPNGAGQLGHEPYTWVHARPPY

SEQ ID NO: 241 - DNA, 1371 bp, Arabidopsis thaliana
  G1452 Reference sequence; functionally related, homologous to G512
atttattaagcatcaatgagagaacttcagagctgggtttgagttctgtccaataatacataaccacgttatcatttttgtcctttactatctcattacactcttctgttattcgcccaattcttacagtcattactctctatagggctcgagcggccgcccgggcaggtttctatgcagatggttcacacttcccgctccattgcccagattgggttcggtgttaagtcgcaattagtactcactatagggctcgagcggccgcccgggcaggtaaaagatcaaacaatgtctaaagaagctgagatgtcgatcgcggtgtcggctttgttccctggttttagattctctcctactgatgttgaacttatctcgtactatcttcgtcgtaaaatcgatggtgatgagaactctgttgctgtgattgctgaggtcgagatttacaagttcgagccgtgggacttgccagaggaatcgaaactgaaatcggagaacgagtggttttacttctgcgcgagggggaggaagtacccgcacgggtcacaaagccggcgagccacacagctaggatattggaaagcgaccggtaaagagcggagtgttaaatccgggaaccaagttgttggaaccaagagaacgcttgtatttcatatcggtcgggctcctcgtggcgagagaacggagtggattatgcatgaatactgcatccatggagccccacaggatgcattagtggtgtgccggttaagaaaaaatgctgattttcgggctagttcgacccaaaaaattgaggatggtgttgtgcaagacgatggctacgttggccaaagaggtggtttggacaaggaggacaaatcctactatgaatctgagcatcagataccaaatggtgacatcgcagaatcatcaaatgttgttgaggatcaggccgataccgatgatgattgttacgccgagattctgaacgatgatataataaagctcgacgaagaagcgttgaaagctagccaagcgtttcgaccaactaatccaactcatcaagaaacaatatcaagcgagtcatcgagtaagaggtcaaaatgtggtataaaaaaagaatcaacggaaacaatgaattgttacgctttgttcaggatcaagaacgttgccggaaccgactccagctggagattcccgaacccgttcaaaatcaagaaagatgatagccagagattgatgaagaatgttctggccactactgttttcttggctatcttattttctttcttttggactgtattaatagctaggaactaaagctagttacgacatacatattatttatacataaataaatatagtattttgtctatggcaaaaaaaaaaaaaaaa

SEQ ID NO: 242 - protein, 373 aa, Arabidopsis thaliana
  G1452 polypeptide Reference sequence; functionally related, homologous to G512
MQMVHTSRSIAQIGFGVKSQLVLTIGLERPPGQVKDQTMSKEAEMSIAVSALFPGFRFSPTDVELISYYLRRKIDGDENSVAVIAEVEIYKFEPWDLPEESKLKSENEWFYFCARGRKYPHGSQSRRATQLGYWKATGKERSVKSGNQVVGTKRTLVFHIGRAPRGERTEWIMHEYCIHGAPQDALVVCRLRKNADFRASSTQKIEDGVVQDDGYVGQRGGLDKEDKSYYESEHQIPNGDIAESSNVVEDQADTDDDCYAEILNDDIIKLDEEALKASQAFRPTNPTHQETISSESSSKRSKCGIKKESTETMNCYALFRIKNVAGTDSSWRFPNPFKIKKDDSQRLMKNVLATTVFLAILFSFFWTVLIARN

SEQ ID NO: 243 - DNA, 732 bp, Arabidopsis thaliana
  G1820 Reference sequence
ctcacttccaacatccaaatccctagaaattgtaaatggctgagaacaacaacaacaacggcgacaacatgaacaacgacaaccaccagcaaccaccgtcgtactcgcagctgccgccgatggcatcatccaaccctcagttacgtaattactggattgagcagatggaaaccgtctcggatttcaaaaaccgtcagcttccattggctcgaattaagaagatcatgaaggctgatccagatgtgcacatggtctccgcagaggctccgatcatcttcgcaaaggcttgcgaaatgttcatcgttgatctcacgatgcggtcgtggctcaaagccgaggagaacaaacgccacacgcttcagaaatcggatatctccaacgcagtggctagctctttcacctacgatttccttcttgatgttgtccctaaggacgagtctatcgccaccgctgatcctggctttgtggctatgccacatcctgacggtggaggagtaccgcaatattattatccaccgggagtggtgatgggaactcctatggttggtagtggaatgtacgcgccatcgcaggcgtggccagcagcggctggtgacggggaggatgatgctgaggataatggaggaaacggcggcggaaattgaagtgtagatttagggtttgtaaccgcctatgtgggaaatttgaaatttggtggtgtttattagggttcttcaattcgtcggatttgct

SEQ ID NO: 244 - protein, 202 aa, Arabidopsis thaliana
  G1820 polypeptide Reference sequence
MAENNNNNGDNMNNDNHQQPPSYSQLPPMASSNPQLRNYWIEQMETVSDFKNRQLPLARIKKIMKADPDVHMVSAEAPIIFAKACEMFIVDLTMRSWLKAEENKRHTLQKSDISNAVASSFTYDFLLDVVPKDESIATADPGFVAMPHPDGGGVPQYYYPPGVVMGTPMVGSGMYAPSQAWPAAAGDGEDDAEDNGGNGGGN

SEQ ID NO: 245 - DNA, 866 bp, Arabidopsis thaliana
  G2701 reference sequence; predicted polypeptide sequence is paralogous to G1634
gtgtttgtagttgaaacttattcttccctttttttgtttttaggtatggagactctgcatccattctctcacctacctatctctgaccaccggttcgttgttcaagagatggtgagcttacacagctcgagtagcggtagctggactaaagaagagaacaagatgttcgaacgagctcttgcgatatacgctgaagactcgcctgatcgctggtttaaagttgcttccatgatccctggaaagactgtttttgatgttatgaagcaatatagtaagcttgaagaagacgttttcgatattgaagcaggacgtgttcccattcctggttatcctgcagcttcttctcccttggggtttgacacggacatgtgtcgtaaacggcctagtggagctagaggatctgatcaagatcgaaagaaaggagtcccttggacagaggaagaacacaggagattcttgttaggccttctcaagtacggtaaaggagattggagaaacatatcgagaaacttcgtggtgtcaaagacgccaacgcaagtggcgagccacgcccaaaagtattaccagagacagctctccggagccaaggacaaacgcaggccaagtatccatgacatcacaaccggcaatcttctcaatgccaatctcaaccgttccttttccgatcatagagatattctccctgatttagggtttatcgataaggatgatacggaggagggagtaatatttatgggtcagaatctctcttcagaaaatctgttttctccatcaccaacttcattcgaagctgccattaacttcgccggagaaaatgtcttcagtgccggagcttaaggcaacatagaatccccaaactcagcggc

SEQ ID NO: 246 - protein, 263 aa, Arabidopsis thaliana
  G2701 polypeptide reference sequence; paralogous to G1634
METLHPFSHLPISDHRFVVQEMVSLHSSSSGSWTKEENKMFERALAIYAEDSPDRWFKVASMIPGKTVFDVMKQYSKLEEDVFDIEAGRVPIPGYPAASSPLGFDTDMCRKRPSGARGSDQDRKKGVPWTEEEHRRFLLGLLKYGKGDWRNISRNFVVSKTPTQVASHAQKYYQRQLSGAKDKRRPSIHDITTGNLLNANLNRSFSDHRDILPDLGFIDKDDTEEGVIFMGQNLSSENLFSPSPTSFEAAINFAGENVFSAGA

SEQ ID NO: 247 - DNA, 1040 bp, Arabidopsis thaliana
  G2789 Reference sequence; predicted polypeptide sequence is paralogous to G596
ctttagggacaccaaatctattcaacctaaaagccttcttttcccctatattgaccaactttttagcgaatcagaagaggaatggatgaggtatctcgttctcatacaccgcaatttctatcaagtgatcatcagcactatcaccatcaaaacgctggacgacaaaaacgcggcagagaagaagaaggagttgaacccaacaatataggggaagacctagccacctttccttccggagaagagaatatcaagaagagaaggccacgtggcagacctgctggttccaagaacaaacccaaagcaccaatcatagtcactcgcgactccgcgaacgccttcagatgtcacgtcatggagataaccaacgcctgcgatgtaatggaaagcctagccgtcttcgctagacgccgtcagcgtggcgtttgcgtcttgaccggaaacggggccgttacaaacgtcaccgttagacaacctggcggaggcgtcgtcagtttacacggacggtttgagattctttctctctcgggttcgtttcttcctccaccggcaccaccagctgcgtctggtttaaaggtttacttagccggtggtcaaggtcaagtgatcggaggcagtgtggtgggaccgcttacggcatcaagtccggtggtcgttatggcagcttcatttggaaacgcatcttacgagaggctgccactagaggaggaggaggaaactgaaagagaaatagatggaaacgcggctagggcgattggaacgcaaacgcagaaacagttaatgcaagatgcgacatcgtttattgggtcgccgtcgaatttaattaactctgtttcgttgccaggtgaagcttattggggaacgcaacgaccgtctttctaagataatatcattgataatataagtttcgtcttcttattctttttcactttttacctttttcactttcttaggttttgttttaacgtttgattaatacctgaaggtttttggaaaattttcgatcggataaaaggatttatgttgcgagccgaaacgcggcc

SEQ ID NO: 248 - protein, 265 aa, Arabidopsis thaliana
  G2789 polypeptide reference sequence; paralogous to G596
MDEVSRSHTPQFLSSDHQHYHHQNAGRQKRGREEEGVEPNNIGEDLATFPSGEENIKKRRPRGRPAGSKNKPKAPIIVTRDSANAFRCHVMEITNACDVMESLAVFARRRQRGVCVLTGNGAVTNVTVRQPGGGVVSLHGRFEILSLSGSFLPPPAPPAASGLKVYLAGGQGQVIGGSVVGPLTASSPVVVMAASFGNASYERLPLEEEEETEREIDGNAARAIGTQTQKQLMQDATSFIGSPSNLINSVSLPGEAYWGTQRPSF

SEQ ID NO: 249 - DNA, 495 bp, Arabidopsis thaliana
  G2839 Reference sequence; predicted polypeptide sequence is paralogous to G354
atggttgcgagaagtgaggaagttgagatagtggaagatacggcggcgaaatgtttgatgttgttatcaagagttggagaatgcggcggaggaggagagaaacgagttttccgatgcaagacttgtcttaaagagttttcgtcgtttcaagctttgggaggtcatcgtgcaagccacaagaaactcattaacagtagcgatccatcacttcttggatccttgtctaacaagaaaactaaaacggcgacgtctcatccttgtccgatatgtggcgtggagtttccgatggggcaagctcttggtggtcacatgaggagacataggagtgagaaagcctcaccaggcacgttggttacacgttcttttttaccggagacgacgacggtgacgactttgaaaaaatcgagtagtgggaagagagtggcttgtttggacttagattcgatggagagtttagtcaattggaagttggagttgggaagaacgatttcttga

SEQ ID NO: 250 - protein, 164 aa, Arabidopsis thaliana
  G2839 polypeptide reference sequence; paralogous to G354
MVARSEEVEIVEDTAAKCLMLLSRVGECGGGGEKRVFRCKTCLKEFSSFQALGGHRASHKKLINSSDPSLLGSLSNKKTKTATSHPCPICGVEFPMGQALGGHMRRHRSEKASPGTLVTRSFLPETTTVTTLKKSSSGKRVACLDLDSMESLVNWKLELGRTIS

SEQ ID NO: 251 - DNA, 1569 bp, Arabidopsis thaliana
  G2854 Reference sequence; predicted polypeptide sequence is paralogous to G1940
tctctcttttgcccttacgtcctcgagctcaaccctttaattgcatctacgacagtcgtaccttttgctaggttatcgtcgtcatgatgcagcagccacctccagcttccaacggtgctgcaacagggccagggcagattccttccgaccaacaagcttacctccagcagcagcagtcgtggatgatgcagcaccagcagcaacaacaaggtcagccgcctgcaggatggaatcagcagtctgcaccgtcttctggtcaaccacagcagcagcagtatggtggtggtggatctcagaatccaggatcagctggtgagatccggtccctgtggatcggtgacttgcagccatggatggatgagaactatctcatgaacgtctttggtcttactggcgaggctacagcagctaaagttattcgcaataaacagaacggatattcagaaggttatggctttattgagtttgtgaaccatgctacagctgagaggaatttacagacttacaatggtgctccgatgccgagcagtgagcaggccttcaggttgaactgggctcagcttggagctggagagagacgccaggctgaagggcctgagcacacagtttttgttggagacttggcacctgatgttaccgaccacatgcttactgaaacgtttaaagctgtgtattcctctgtcaagggagctaaagttgtgaatgataggactactggacggtccaagggttatggatttgtcaggtttgcggatgaaagtgagcagattcgtgccatgactgaaatgaatggtcaatactgctcatcaaggcctatgcgtactggtcctgctgccaacaagaagcctcttacaatgcaaccagcttcatatcagaacactcaaggaaattcaggagaaagtgatccaactaacacaacaatttttgttggagctgtggatcaaagtgtaacagaagatgatttgaagtcagtttttggtcaatttggtgaactagttcatgtgaaaatacccgcaggaaaacgttgcggatttgttcaatacgccaatagggcatgtgctgagcaagcactttctgtgttgaacggaacacaacttgggggacaaagcattcgtctttcatggggtcgcagtccttccaacaaacagactcaacctgatcaagcccagtatggtggtggtggaggatactatgggtatcctcctcaaggatatgaagcatacggatatgcacctcctcctcaggaccctaacgcctactacggtggttatgctgggggcggctatggaaactaccagcagcctggtggataccagcagcaacagcagtgaagcatgatgtgtaagtcgtgatcgagctgaagttgtagaaagctgtaaccgtttgacaatggtgaatgaattattgaagtggatgtgtattagctcttcttgtctcagattctctcttcaactcttttttttttcttttggattatttttctttcgcgtggctattgttgagtgtccttgcaagtcataacaaaaagcttaaacccaagtgttttttgtcatgactaatatgaccatt

SEQ ID NO: 252 - protein, 415 aa, Arabidopsis thaliana
  G2854 polypeptide  reference sequence; paralogous to G1940
MMQQPPPASNGAATGPGQIPSDQQAYLQQQQSWMMQHQQQQQGQPPAGWNQQSAPSSGQPQQQQYGGGGSQNPGSAGEIRSLWIGDLQPWMDENYLMNVFGLTGEATAAKVIRNKQNGYSEGYGFIEFVNHATAERNLQTYNGAPMPSSEQAFRLNWAQLGAGERRQAEGPEHTVFVGDLAPDVTDHMLTETFKAVYSSVKGAKVVNDRTTGRSKGYGFVRFADESEQIRAMTEMNGQYCSSRPMRTGPAANKKPLTMQPASYQNTQGNSGESDPTNTTIFVGAVDQSVTEDDLKSVFGQFGELVHVKIPAGKRCGFVQYANRACAEQALSVLNGTQLGGQSIRLSWGRSPSNKQTQPDQAQYGGGGGYYGYPPQGYEAYGYAPPPQDPNAYYGGYAGGGYGNYQQPGGYQQQQQ

SEQ ID NO: 253 - DNA, 914 bp, Arabidopsis thaliana
  G3083; reference sequence
caaaatatgagccaagagacagcgatagcaagcttcaagaaattccaacagtcatggatcgagcagctacgaaaccacctgaaccacctccgctccgcccaaaaccatcaccggaactctgctaccggtgatgaggaacggttaagggaggctgtggacagagtgatggaacactttagagaatatcacagggccaagtgggctgcgacggataaagacgtcatcgaagttatggcttctccttgggcttcagctcttgaacggtcgcttcagtgggtcggtggttggcgaccaaccaccttgttccatctggtttacactgagtcgagtattttatttgagtctcgtatcgttgatatacttcgtggctttcgcaccggtgatctcagtgatctctccccttctcagttcaggacggtaagtgagctacaatgtgagaccgtgaaggaagagaatgcgataacggaagagttgtcggagtggcaagacgatgcgagtgaccttgtcatggggacatcgtcagatcccgaccagaggatccgacggctagcagaaatcgtccaccgaactgatgatctgcgactgagaacgatcacacgtgtggtggaggtcttgagtccgctccaacaagcggagtttcttgtcgctgcggctgagcttcgtacaggcgttgctggttgggggactagccacgaccgtcgtcgaagttccgaagtttaaagctaactaaaaccggtctaaaggtaatgagaatcgaggaagaaaaatagtttttggatattaattatatgtttttaccatgtttttggttatccagactgagtttggttttacatggttatgaaaacaaaaaaaactcatatgttatgtctctacggttgcaataaagatcaacccacgtgtggtgcttgtta

SEQ ID NO: 254 - protein, 237 aa, Arabidopsis thaliana
  G3083 polypeptide; reference sequence
MSQETAIASFKKFQQSWIEQLRNHLNHLRSAQNHHRNSATGDEERLREAVDRVMEHFREYHRAKWAATDKDVIEVMASPWASALERSLQWVGGWRPTTLFHLVYTESSILFESRIVDILRGFRTGDLSDLSPSQFRTVSELQCETVKEENAITEELSEWQDDASDLVMGTSSDPDQRIRRLAEIVHRTDDLRLRTITRVVEVLSPLQQAEFLVAAAELRTGVAGWGTSHDRRRSSEV

SEQ ID NO: 255 - DNA, 1974 bp, Arabidopsis thaliana
  G184; predicted polypeptide sequence is paralogous to G916
tgaattctagcctttttgtaggcgaatcatctggaccggtaagagactctctcatcgataataaccacataatttaatcaaactctttctctctctttctaagatcttttgctttgctcttttcctttttgatcttcctatatatggagaagcaccaaaacggtacttactatacgatactgtacggatccatcaaactggattaattatcaaaacgtacatttttatcttacctggcaagttacattcctagggttttggagaatccaatcaacaacaaagaaaataatcatcgttacaataatcagtatcacgcacagacttagatgttccggtttccagtgagtctaggcggttcacgtgacgaagaccgtcacgatcagatcacaccgttggatgaccatcgtgtggtggttgatgaggttgacttcttctcagagaagagagatagggtttcacgtgagaacatcaacgacgacgacgacgaaggcaataaggttctcatcaaaatggagggttcacgagttgaagaaaacgatcgttccagagatgtcaatatcggtctgaatcttctgaccgcgaatacgggaagcgatgagtcaacggtggatgatggactatcaatggatatggaagataaacgtgcaaagattgagaacgcacaactacaagaagagctcaagaagatgaaaatagagaatcaaaggctaagagatatgttgagccaagcgacgaccaacttcaatgccttacaaatgcaacttgttgccgtcatgaggcaacaagaacaacgtaactcttcacaagatcatctcctggagagcaaagcagaaggaaggaaacggcaggaactgcaaatcatggtgccaaggcagttcatggaccttgggccgtcgtctggagcagcagagcatggagccgaagtgtcatctgaagagaggacaacggttcgttcaggttctcctccttcgcttctagaaagttccaatccccgagagaacggaaagaggttgcttggaagagaagaaagctcagaggaatcagagtctaacgcctggggaaaccctaacaaagtccccaaacataatccatcctctagcaatagcaatggaaacagaaacggaaatgttattgatcagtcggccgcagaagccaccatgcggaaagcccgtgtctcagttcgtgcccgatctgaagctgccatgataagcgatggatgtcaatggagaaagtacggacaaaaaatggctaaaggaaacccgtgtccgcgggcttattatcgttgcacaatggccggtggatgtccagttcgcaagcaagtgcagcgttgcgcagaagacagatctattctcataaccacctacgaaggaaaccacaaccatccactcccaccagccgctacggccatggcctcaacaaccaccgcagctgcaagcatgctcctctcgggctcaatgtcgagtcaagacggtttaatgaacccaacaaacctcctagctcgagctatcttgccttgctcctcaagcatggctacaatctcagcctccgcaccattcccaaccatcacattggacctcaccaattcacccaacggtaacaaccctaatatgaccactaataacccgttgatgcagttcgctcaacggcccggtttcaacccggcagttttgcctcaagtggttggtcaagctatgtacaataaccaacaacagtccaagttttctggtttacagttaccggctcagccactgcagatcgcggccacttcctcggtggccgagagcgttagtgctgccagtgcagcaattgcgtccgatccaaactttgcggcggctctagcggcagcgatcacgtccattatgaacggttccagtcatcaaaataataacaccaataataataatgtggctacgagcaacaatgacagtaggcaataagagttttcattttgatggtcgatttttttttttgggg

SEQ ID NO: 256 - protein, 536 aa, Arabidopsis thaliana
  G184 polypeptide; paralogous to G916
MFRFPVSLGGSRDEDRHDQITPLDDHRVVVDEVDFFSEKRDRVSRENINDDDDEGNKVLIKMEGSRVEENDRSRDVNIGLNLLTANTGSDESTVDDGLSMDMEDKRAKIENAQLQEELKKMKIENQRLRDMLSQATTNFNALQMQLVAVMRQQEQRNSSQDHLLESKAEGRKRQELQIMVPRQFMDLGPSSGAAEHGAEVSSEERTTVRSGSPPSLLESSNPRENGKRLLGREESSEESESNAWGNPNKVPKHNPSSSNSNGNRNGNVIDQSAAEATMRKARVSVRARSEAAMISDGCQWRKYGQKMAKGNPCPRAYYRCTMAGGCPVRKQVQRCAEDRSILITTYEGNHNHPLPPAATAMASTTTAAASMLLSGSMSSQDGLMNPTNLLARAILPCSSSMATISASAPFPTITLDLTNSPNGNNPNMTTNNPLMQFAQRPGFNPAVLPQVVGQAMYNNQQQSKFSGLQLPAQPLQIAATSSVAESVSAASAAIASDPNFAAALAAAITSIMNGSSHQNNNTNNNNVATSNNDSRQ

SEQ ID NO: 257 - DNA, 1931 bp, Arabidopsis thaliana
  G186; predicted polypeptide sequence is paralogous to G916
ctttcaaccaaacccctaaacaaaaaaaaaatacattttctgatctctctaaaaatctttctccttcgttaatctcgtgatctctttctttttctatatatggacagaggatggtctggtctcactcttgattcatcttctcttgatcttttaaaccctaatcgtatttctcataagaatcaccgacgtttctcaaatcctttggcgatgtctagaattgacgaagaagatgatcagaagacgagaatatcaaccaacggtagtgaatttaggtttccggtgagtctctcaggtattcgtgatcgtgaagatgaagatttttcatctggcgttgctggagataatgaccgtgaagttcccggcgaagtggatttcttctccgacaagaaatctagggtttgtcgtgaagacgacgaaggatttcgtgtgaagaaggaagaacaagatgatcgaacggacgtaaataccggtttgaatcttcgaacaactggtaatacaaagagtgatgagtcaatgatcgatgatggagaatcttccgaaatggaagataagcgtgcgaaaaatgagttggtgaaattacaagatgagttgaagaaaatgacaatggataatcaaaagcttagagaattgcttacacaagttagcaacagttacacttcacttcagatgcatcttgtttcactaatgcagcaacagcaacaacagaacaataaggtaatagaagctgctgagaagcctgaggagacgatagtaccaaggcaatttattgatttaggccctacgagagcagtaggtgaggccgaggatgtgtcaaattcttcatccgaagatagaactcgttcggggggttcttctgcagccgagaggcgtagtaacgggaagagacttgggcgtgaagaaagccccgaaactgagtccaacaaaattcagaaggtgaattctactaccccgacgacatttgatcaaaccgctgaagctacgatgaggaaagcccgtgtctccgttcgtgcccgatcggaagctccgatgataagcgatggatgtcaatggagaaaatatggccagaagatggccaaagggaatccttgtccgcgggcatattaccgctgcacgatggccacgggctgtcccgttcgcaaacaagttcaacgttgcgcggaagacagatcaattctgattacaacctacgagggaaaccataaccatccgttgccgccagccgcggtagccatggcttctaccaccacggcggcggctaacatgttgctatccgggtcaatgtctagtcacgacgggatgatgaaccctacaaatttactagctagggctgttcttccttgctccacaagcatggcaacaatctcagcctccgcgccgtttccaaccgtcacattagacctcacccactcacctccgcctcctaatggttccaatccttcctcttccgcggctaccaacaacaaccacaactcactgatgcagcggccgcaacaacaacaacagcaaatgacgaacttacctccgggaatgctacctcatgtaataggccaggcattgtataaccaatccaagttctcggggctgcagttctctggtggctctccctcgacggcagcgttttctcagtcacacgcggtggctgatacaataacggcactcacagctgacccgaatttcacggcggctcttgcagccgttatttcttctatgatcaatggtacgaaccaccacgacggcgaaggaaacaacaaaaatcaatagaaaaatattacattttttttttgggtatctacattttttttccaactgggttataggaaacagagagtttatttcattgattcacatttgttctgtttcgtaccaaaatcccagtaaatatacaaaagcaaactatactcaagttcatattcgtaaacactataaatagt

SEQ ID NO: 258 - protein, 553 aa, Arabidopsis thaliana
  G186 polypeptide; paralogous to G916
MDRGWSGLTLDSSSLDLLNPNRISHKNHRRFSNPLAMSRIDEEDDQKTRISTNGSEFRFPVSLSGIRDREDEDFSSGVAGDNDREVPGEVDFFSDKKSRVCREDDEGFRVKKEEQDDRTDVNTGLNLRTTGNTKSDESMIDDGESSEMEDKRAKNELVKLQDELKKMTMDNQKLRELLTQVSNSYTSLQMHLVSLMQQQQQQNNKVIEAAEKPEETIVPRQFIDLGPTRAVGEAEDVSNSSSEDRTRSGGSSAAERRSNGKRLGREESPETESNKIQKVNSTTPTTFDQTAEATMRKARVSVRARSEAPMISDGCQWRKYGQKMAKGNPCPRAYYRCTMATGCPVRKQVQRCAEDRSILITTYEGNHNHPLPPAAVAMASTTTAAANMLLSGSMSSHDGMMNPTNLLARAVLPCSTSMATISASAPFPTVTLDLTHSPPPPNGSNPSSSAATNNNHNSLMQRPQQQQQQMTNLPPGMLPHVIGQALYNQSKFSGLQFSGGSPSTAAFSQSHAVADTITALTADPNFTAALAAVISSMINGTNHHDGEGNNKNQ

SEQ ID NO: 259 - DNA, 727 bp, Arabidopsis thaliana
  G353 Predicted polypeptide sequence is paralogous to G354
accaaactcaaaaaacacaaaccacaagaggatcatttcattttttattgtttcgttttaatcatcatcatcagaagaaaaatggttgcgatatcggagatcaagtcgacggtggatgtcacggcggcgaattgtttgatgcttttatctagagttggacaagaaaacgttgacggtggcgatcaaaaacgcgttttcacatgtaaaacgtgtttgaagcagtttcattcgttccaagccttaggaggtcaccgtgcgagtcacaagaagcctaacaacgacgctttgtcgtctggattgatgaagaaggtgaaaacgtcgtcgcatccttgtcccatatgtggagtggagtttccgatgggacaagctttgggaggacacatgaggagacacaggaacgagagtggggctgctggtggcgcgttggttacacgcgctttgttgccggagcccacggtgactacgttgaagaaatctagcagtgggaagagagtggcttgtttggatctgagtctagggatggtggacaatttgaatctcaagttggagcttggaagaacagtttattgattttatttattttccttaaattttctgaatatatttgtttctctcattctttgaatttttcttaatattctagattatacatacatccgcagatttaggaaactttcatagagtgtaatcttttctttctgtaaaaatatattttacttgtagcaaa

SEQ ID NO: 260 - protein, 162 aa, Arabidopsis thaliana
  G353 polypeptide Paralogous  to G354
MVAISEIKSTVDVTAANCLMLLSRVGQENVDGGDQKRVFTCKTCLKQFHSFQALGGHRASHKKPNNDALSSGLMKKVKTSSHPCPICGVEFPMGQALGGHMRRHRNESGAAGGALVTRALLPEPTVTTLKKSSSGKRVACLDLSLGMVDNLNLKLELGRTVY

SEQ ID NO: 261 - DNA, 1285 bp, Arabidopsis thaliana
  G512; predicted polypeptide sequence is paralogous to G1452
aaagctccctgagcaagtgagaagagaccacactgagaagaaaaatccttcaggttatcgaaaattcccggattttactctttgggcggtggccgatttcttacgcgctctttttgtggcgactgttgtatacgcgcgagccttcatggacacgaaggcggttggagtttctaaggatacggcggcgtcgatggaagcgtcgacggtgtttcctgggtttaaattctcgccgacggatgtggagttgatttcgtattacctgaagcggaagatggatggcttggagaggtccgttgaggttataccggaccttgagatttacaatttcgagccttgggatttacccgataagtcgattgtgaaatctgatagcgagtggttcttcttctgtgcgcgtgggaaaaagtatccacatggttcacagaacaggagagcaacgaagatgggatactggaaagcaactgggaaagagcgtgatgtgaagtctggttctgaggtcattggaacaaagaggacgcttgttttccatattggtcgtgcaccaaaaggcgaaagaactgactggattatgcacgagtactgcgtgaaaggagtatctctggatgatgctatggttgtttgccgggttaggaggaacaaagaatacaatagtggtacaagtcagaaggcaccaaagccaaattcatcagccgagaagcatgcgaaagtccaaaatggcgctacgagttcagggagcccgtctgattgggacaacttggttgatttttacctagcaggtgaatcaggggagaaactactcgctgagatggcagagtcatcagaaaatctacaggtggataatgacgaggatttctttgcggatatcctaagagacgaaatcatcaatctcgatgaagcggtgatgacagggaacacaccaaacgaagtgccaacactagaatcagcatcaatggagataagggtacttcctttaccaaacatgatagacaaacaaatgtcatcactgttagaggaaagaccatcacagaagaagaaaggaaaagacgccacggaatcattgtcgagctgcttcgtgggtttatactcgatcaaatcagtgaacaaggcacgatgggatgttattataggtgtagtggctctgatagcaatgttgttttatctagaataagaggcttatggaagtagcgaaaaacagtgtcctagctatgtttgtatcatcttttctcggacattgacaaggattatatgatgtttttgtgtaaaaaaaaaaaaaaaaaaaaaaaaa

SEQ ID NO: 262 - protein, 340 aa, Arabidopsis thaliana
  G512 polypeptide; paralogous to G1452
MDTKAVGVSKDTAASMEASTVFPGFKFSPTDVELISYYLKRKMDGLERSVEVIPDLEIYNFEPWDLPDKSIVKSDSEWFFFCARGKKYPHGSQNRRATKMGYWKATGKERDVKSGSEVIGTKRTLVFHIGRAPKGERTDWIMHEYCVKGVSLDDAMVVCRVRRNKEYNSGTSQKAPKPNSSAEKHAKVQNGATSSGSPSDWDNLVDFYLAGESGEKLLAEMAESSENLQVDNDEDFFADILRDEIINLDEAVMTGNTPNEVPTLESASMEIRVLPLPNMIDKQMSSLLEERPSQKKKGKDATESLSSCFVGLYSIKSVNKARWDVIIGVVALIAMLFYLE

SEQ ID NO: 263 - DNA, 1394 bp, Arabidopsis thaliana
  G596; predicted polypeptide sequence is paralogous to G2789
taatttctctacttcagatttttttctccttagattaatttaattgagttattgtacatccctcaagctaagattctggttttgtgagttgagtggatgagaagaggagagattaactaaattagggtttcaattgtttactttttgtttgctttttatatcaagtaatggatcaggtctctcgctctcttcctccaccttttctctcaagagatctccatcttcacccacaccatcaattccagcatcagcagcagcagcagcaacagaatcacggccacgatatagaccagcaccgaatcggtgggctaaaacgtgaccgagatgctgatatcgatcccaacgagcactcttcagccggaaaagatcaaagtactcctggctccggtggagaaagcggcggcggaggaggaggagataatcacatcacgagaaggccacgtggcagaccagcgggatctaagaacaaaccaaaaccgccaatcatcatcactcgagacagcgcaaacgctctcaaatctcatgtcatggaagtagcaaacggatgtgacgtcatggaaagtgtcaccgtcttcgctcgccgtcgccaacgtggcatctgcgttttgagcggaaacggcgccgttaccaacgttaccataagacaaccagcttcagtacctggtggtggctcatctgtcgttaacttacacggacgtttcgagattctttctctctcgggatcattccttcctcctccggctccaccagctgcgtcaggtctaacgatttacttagccggtggtcagggacaggttgttggaggaagcgtggttggtccactcatggcttcaggacctgtagtgattatggcagcttcgtttggaaacgctgcgtatgagagactgccgttggaggaagacgatcaagaagagcaaacagctggagcggttgctaataatatcgatggaaacgcaacaatgggtggtggaacgcaaacgcaaactcagacgcagcagcaacagcaacaacagttgatgcaagatccgacgtcgtttatacaagggttgcctccgaatcttatgaattctgttcaattgccagctgaagcttattggggaactccgagaccatctttctaaatcgcgaagaaaaaacaagttagatacgttcgttgtttttaatttataatctctcttctgtcaagttttaattttctttttcttcttctttgttttctaaagataattgtagtctttgacgaagattcgtggtacgtatgaatcgaagagaatcgttttggtcatgggattgctcgatctattaggtttgagagggggtttgtgttttgcgttgactagcagattataaaattgttgattttcgagtttttattttcatgtgttggtgataaa

SEQ ID NO: 264 - protein, 317 aa, Arabidopsis thaliana
  G596 polypeptide; paralogous to G2789
MDQVSRSLPPPFLSRDLHLHPHHQFQHQQQQQQQNHGHDIDQHRIGGLKRDRDADIDPNEHSSAGKDQSTPGSGGESGGGGGGDNHITRRPRGRPAGSKNKPKPPIIITRDSANALKSHVMEVANGCDVMESVTVFARRRQRGICVLSGNGAVTNVTIRQPASVPGGGSSVVNLHGRFEILSLSGSFLPPPAPPAASGLTIYLAGGQGQVVGGSVVGPLMASGPVVIMAASFGNAAYERLPLEEDDQEEQTAGAVANNIDGNATMGGGTQTQTQTQQQQQQQLMQDPTSFIQGLPPNLMNSVQLPAEAYWGTPRPSF

SEQ ID NO: 265 - DNA, 925 bp, Arabidopsis thaliana
  G714; predicted polypeptide sequence is paralogous to G489
ccacgcgtccgcgtcaatctttgagtttggtagagaaatggatcaacaaggacaatcatcagctatgaactatggttcaaacccatatcaaaccaacgccatgaccactacaccaaccggttcagaccatccagcttaccatcagatccaccagcaacaacaacaacagctcactcaacagcttcaatctttctgggagactcaattcaaagagattgagaaaaccactgatttcaagaaccatagccttccattggcaagaatcaagaaaatcatgaaagctgatgaagatgtgcgtatgatctcggccgaggcgcctgttgtgttcgccagggcctgcgagatgtttattctggagcttacgttaaggtcttggaaccatactgaggagaacaagagaaggacgttgcagaagaatgatatcgcggctgcggtgactagaactgatatttttgattttcttgtggatattgttcctcgggaggatcttcgtgatgaagtcttgggtggtgttggtgctgaagctgctacagctgcgggttatccgtatggatacttgcctcctggaacagctccaattgggaacccgggaatggttatgggtaacccgggcgcgtatccgccgaaggcgtatatgggtcagccaatgtggcaacaaccaggacctgagcagcaggatcctgacaattagcttggcctaataaactagccgtctaattcgaagctctccccggtggatctactcaagaagaagaatgttaatagaaaactattgcgacataaaaagtttggtgtagtagaataatttctgttttatgatccatggatttatcaattgttattcagtttggtttatcttgtcatcaaactgttttcggtcaatgtaacaaattcataaattgagaattgaacttacaaaaggcta

SEQ ID NO: 266 - protein, 217 aa, Arabidopsis thaliana
  G714 polypeptide; paralogous to G489
MDQQGQSSAMNYGSNPYQTNAMTTTPTGSDHPAYHQIHQQQQQQLTQQLQSFWETQFKEIEKTTDFKNHSLPLARIKKIMKADEDVRMISAEAPVVFARACEMFILELTLRSWNHTEENKRRTLQKNDIAAAVTRTDIFDFLVDIVPREDLRDEVLGGVGAEAATAAGYPYGYLPPGTAPIGNPGMVMGNPGAYPPKAYMGQPMWQQPGPEQQDPDN

SEQ ID NO: 267 - DNA, 2603 bp, Arabidopsis thaliana
  G877  Predicted polypeptide sequence is paralogous to G175
caaagattagactaatccgactgtgtttttaatcaatcatcattttatttaggggagagaagttgtaaagttttgatttttttttctgggttttttctgtgagacccagaagaagaacagagagaggaagaaggagaagaaaaaaatatctctttctctccggctttcaacaaaatctctcttttttccttcatcagtgttaaattcggatccgggtcgggtgggttttcggtttttggtgttcggatcagagcacagttggatgttagcgacggaactgaggatttcagtttgcggctgcggcggctgtgacggtgtttgtgtgtcgtcttcttttatcaatcaggagtttcatcacagtttgatcagagattcagccaaattcttggatactaaatggctggttttgatgaaaatgttgctgtgatgggagaatgggtgcctcgtagtcctagtcccgggacacttttctcctctgctattggagaagagaagagctcgaaacgtgttcttgaaagagagttatctttgaatcatggtcaagttattggtttagaagaagacactagtagtaatcataacaaggattcttcacaaagcaatgtttttcgaggtggtctcagtgaaagaattgctgcaagagctggatttaatgctccaaggttgaacactgagaatatccgcaccaacaccgacttttccattgactctaaccttcgatctccttgcttaaccatctcttctcctggccttagccctgcaacactcttggaatctcctgttttcctttctaacccattggctcaaccttctccaactaccgggaaatttccatttcttcctggtgttaatggtaatgcattgtcttctgagaaagcgaaagacgagttctttgatgatattggagcatcattcagcttccatcctgtttcaagatcatcttcctctttcttccaaggcacaacagagatgatgtcagttgattatggtaactacaacaatagatcttcttctcatcaatccgcagaagaagtaaaacctggctctgaaaacatagaaagctccaatctttatgggattgaaactgacaatcaaaacgggcagaacaagacatctgatgtcactacaaacaccagtcttgaaaccgtggatcatcaagaggaagaagaagagcaaagacgcggtgattcgatggctggtggtgcgcctgcagaggatggatataactggaggaaatacggacaaaagttggtcaaaggaagtgagtatccgcgaagctattacaagtgcacaaacccgaattgtcaggtgaagaagaaagttgagagatcaagggaaggtcacatcacagagattatatacaaaggagctcataatcatcttaaacctccacctaatcgccgctcagggatgcaagtagatggaactgaacaagttgaacaacaacaacaacagagagattctgctgcaacgtgggttagttgtaataacactcaacaacaaggtggaagcaatgagaacaatgtcgaagagggatctacgagattcgagtatggaaaccaatctggatcaattcaagctcaaaccggaggtcaatacgagtcaggtgatcctgtggttgtggttgatgcttcttcaacattctctaatgatgaagatgaagatgatcgagggacacatggaagtgtttctttgggttacgatggaggaggaggaggtgggggaggagaaggagatgaatcagagtcgaaaagaaggaaactagaagcttttgcagcagagatgagtggatcaacaagagccatacgtgagccaagagttgttgtgcagacaacgagtgatgttgacattcttgatgatggttatcgctggcgaaaatatggtcagaaagttgtcaaaggcaatccaaatccaaggagttattacaaatgcacagctccaggatgtacagtgaggaaacatgttgaaagagcttctcatgatctcaaatccgttataacaacttacgaaggcaaacataaccatgacgtccccgctgcacgcaacagcagccacggaggcggtggtgatagtggtaacggtaacagcggcggttcagccgcagtttctcaccattaccacaacggtcatcactcagagccgccacgtgggagattcgacagacaagtcacaactaacaatcagtctccttttagccgtccctttagctttcagccacatttgggtcctccttctggtttctccttcggtttaggacaaaccggtttggttaatctttcaatgcctggtttagcgtatggtcaagggaaaatgccgggtttgcctcacccgtatatgacacaaccggttgggatgagtgaagcaatgatgcagagagggatggaaccaaaggttgaaccggtttcagattcaggacaatcggtatataaccagatcatgagtagattacctcagatttgaaatttactcttcttcttcttcttctgcatttggtcactccttataataacttttaatttctgcttcttcttcttctttcatttattggtttcaaactttggggaaggtaaaggctgttttattgttaaaaaaaaaaaaaaaaa

SEQ ID NO: 268 - protein, 687 aa, Arabidopsis thaliana
  G877 polypeptide  Paralogous  to G175
MAGFDENVAVMGEWVPRSPSPGTLFSSAIGEEKSSKRVLERELSLNHGQVIGLEEDTSSNHNKDSSQSNVFRGGLSERIAARAGFNAPRLNTENIRTNTDFSIDSNLRSPCLTISSPGLSPATLLESPVFLSNPLAQPSPTTGKFPFLPGVNGNALSSEKAKDEFFDDIGASFSFHPVSRSSSSFFQGTTEMMSVDYGNYNNRSSSHQSAEEVKPGSENIESSNLYGIETDNQNGQNKTSDVTTNTSLETVDHQEEEEEQRRGDSMAGGAPAEDGYNWRKYGQKLVKGSEYPRSYYKCTNPNCQVKKKVERSREGHITEIIYKGAHNHLKPPPNRRSGMQVDGTEQVEQQQQQRDSAATWVSCNNTQQQGGSNENNVEEGSTRFEYGNQSGSIQAQTGGQYESGDPVVVVDASSTFSNDEDEDDRGTHGSVSLGYDGGGGGGGGEGDESESKRRKLEAFAAEMSGSTRAIREPRVVVQTTSDVDILDDGYRWRKYGQKVVKGNPNPRSYYKCTAPGCTVRKHVERASHDLKSVITTYEGKHNHDVPAARNSSHGGGGDSGNGNSGGSAAVSHHYHNGHHSEPPRGRFDRQVTTNNQSPFSRPFSFQPHLGPPSGFSFGLGQTGLVNLSMPGLAYGQGKMPGLPHPYMTQPVGMSEAMMQRGMEPKVEPVSDSGQSVYNQIMSRLPQI

SEQ ID NO: 269 - DNA, 1008 bp, Arabidopsis thaliana
  G1357; predicted polypeptide sequence is paralogous to G1452
atggcagctgcaccaccgatcgagccggcggtgacgacgacgttccctggcttcaaattctccccgaccgacatcgaacttatatcttattacttgaagaggaagatggatggtttggagagatctgttgagattatacctgaggttgagatttacaacttcgagccttgggatttacctgataagtctatcgttaaatcggatagcgaatggttcttcttctgtgctcgcggtaagaagtatccccacggttcacagaacagaagagcaaccaagataggatattggaaagccacaggaaaagagcgtaatgtgaagtcaggttctgaggtcattggaacaaagagaacgcttgtattccacattggccgcgcgccaaaaggaggaagaacggaatggcttatgcatgagtactgcatgattggagtatcactggatgctctggttatttgccgacttaggaggaatactgaatttcaagggagtacaattcaaaagccaccacaaccaagtttaccactggataagcacgtaaacttgcggaatgaagctatttcagaaagtatttatggttgggaaactatggttgatttctacttatcaagtgagtcagggcaagaactacttagtgaaatagcagaatcttcacaatcttcacaaaatccacaggttcctagtgaagaagatttctatgccgatatactgagggatgaaatagtaaagctagatgatccggcggtatccggtaatacactgatcaatgtaccaaggcttcaaacagagtccaataccacaagagtactacctttacctgacatggtagacaaacaaatgcaatcgttgctacagaaactaccattacaaaatgacactggagaagagaacaacatatccatgtcaaattgctttatcggtatctactcgattaagtctataaaccgagcgcgatgggacgttgttgtttggttactcgttatgatagccgtgttggtgttttatttagtgtga

SEQ ID NO: 270 - protein, 335 aa, Arabidopsis thaliana
  G1357 polypeptide; paralogous to G1452
MAAAPPIEPAVTTTFPGFKFSPTDIELISYYLKRKMDGLERSVEIIPEVEIYNFEPWDLPDKSIVKSDSEWFFFCARGKKYPHGSQNRRATKIGYWKATGKERNVKSGSEVIGTKRTLVFHIGRAPKGGRTEWLMHEYCMIGVSLDALVICRLRRNTEFQGSTIQKPPQPSLPLDKHVNLRNEAISESIYGWETMVDFYLSSESGQELLSEIAESSQSSQNPQVPSEEDFYADILRDEIVKLDDPAVSGNTLINVPRLQTESNTTRVLPLPDMVDKQMQSLLQKLPLQNDTGEENNISMSNCFIGIYSIKSINRARWDVVVWLLVMIAVLVFYLV

SEQ ID NO: 271 - DNA, 844 bp, Arabidopsis thaliana
  G1387 Predicted polypeptide sequence is paralogous to G975
tctctctcccactctcactttctctcctattcttagttcgtgtcagaaacacacagagaaattaagaaccctaatttaaaacagaagaatggtacattcgaagaagttccgaggtgtccgccagcgtcagtggggttcttgggtttctgagattcgtcatcctctcttgaagagaagagtgtggctaggaacattcgacacggcggaaacagcggctagagcctacgaccaagccgcggttctaatgaacggccagagcgcgaagactaacttccccgtcatcaaatcgaacggttcaaattccttggagattaactctgcgttaaggtctcccaaatcattatcggaactattgaacgctaagctaaggaagaactgtaaagaccagacaccgtatctgacgtgtctccgcctcgacaacgacagctcacacatcggcgtctggcagaaacgcgccgggtcaaaaacgagtccaaactgggtcaagcttgttgaactaggtgacaaagttaacgcacgtcccggtggtgatattgagactaataagatgaaggtacgaaacgaagacgttcaggaagatgatcaaatggcgatgcagatgatcgaggagttgcttaactggacctgtcctggatctggatccattgcacaggtctaaaggagaatcattgaattatatgatcaagataataatatagttgagggttaataataatcgagggtaagtaatttacgtgtagctaataattaatataattttcgaacatatatatgaatatatgatagctctagaaatgagtacgtatatatacgtaaacatttttcctcaaatatagtatatgtg

SEQ ID NO: 272 - protein, 189 aa, Arabidopsis thaliana
  G1387 polypeptide Paralogous to G975
MVHSKKFRGVRQRQWGSWVSEIRHPLLKRRVWLGTFDTAETAARAYDQAAVLMNGQSAKTNFPVIKSNGSNSLEINSALRSPKSLSELLNAKLRKNCKDQTPYLTCLRLDNDSSHIGVWQKRAGSKTSPNWVKLVELGDKVNARPGGDIETNKMKVRNEDVQEDDQMAMQMIEELLNWTCPGSGSIAQV

SEQ ID NO: 273 - DNA, 896 bp, Arabidopsis thaliana
  G1634; predicted polypeptide sequence is paralogous to G2701
ttatctcgtagcctttaaacgatggagactctgcatccactactctcgcacgtgccaacttctgaccaccggtttgtagttcaagagatgatgtgcttgcaaagctcgagctggactaaagaagagaacaagaagtttgagcgagctcttgctgtctacgctgatgacacgcctgatcgctggttcaaagttgctgctatgatccctggaaagaccatatcagatgtcatgaggcaatactctaagcttgaagaagacctcttcgatatcgaagcaggacttgtcccgatcccgggttaccgttcagttactccttgtggatttgatcaggttgtgagtccacgtgactttgatgcgtatcgtaaacttcctaatggagccagaggatttgatcaagaccgtaggaaaggagttccatggacggaggaagaacacaggagattcttgttagggcttctcaagtatgggaaaggagattggagaaacatatcgaggaactttgtgggatcaaaaacaccaactcaggttgcaagtcatgcccaaaagtactaccaaagacagctttccggtgcgaaagacaaacgacggcctagcattcacgacatcaccaccgtcaatcttctcaatgccaatcttagccgtccatcgtctgatcacggttgcttagtctcaaaacaggccgagccgaaactagggttcaccgacagggataatgcagaggagggagttatgtttcttggtcagaatctatcctcggtcttctcttcctacgatcctgccattaagttttccggagcaaatgtttacggtgaaggaggttactgtatctcacaagatcttgaaacgagaaaatgagaattttgaaattttaactattgcaacgaaaccataattgc

SEQ ID NO: 274 - protein, 277 aa, Arabidopsis thaliana
  G1634 polypeptide; paralogous to G2701
METLHPLLSHVPTSDHRFVVQEMMCLQSSSWTKEENKKFERALAVYADDTPDRWFKVAAMIPGKTISDVMRQYSKLEEDLFDIEAGLVPIPGYRSVTPCGFDQVVSPRDFDAYRKLPNGARGFDQDRRKGVPWTEEEHRRFLLGLLKYGKGDWRNISRNFVGSKTPTQVASHAQKYYQRQLSGAKDKRRPSIHDITTVNLLNANLSRPSSDHGCLVSKQAEPKLGFTDRDNAEEGVMFLGQNLSSVFSSYDPAIKFSGANVYGEGGYCISQDLETRK

SEQ ID NO: 275 - DNA, 625 bp, Arabidopsis thaliana
  G1889  Predicted polypeptide sequence is paralogous to G354
acacgatcaaaactcattattcaacaaagtcttcgtttcatttttcatttttcatttctcaaccaaaaaaaaaaagagtgattttttttttaatcatcagtcaaatggaaaggggaagatcagatatggagatgataaacaacatggcaaattgcttgattcttctatcaaaggcccatcaaaacgacaccaaaagccgtgttttcgcgtgcaagacatgcaacaaagagttcccgtcgttccaagccttgggaggtcaccgagccagccaccggcgatccgcagcgcttgaaggccacgcacctccttctcctaagagagtcaaaccggtgaaacacgagtgtcccatatgtggtgctgagttcgcggtagggcaggccttaggtggtcacatgaggaagcatagaggtggatcaggaggaggaggtggccggagtttggcgccggctacagcgccggtgacgatgaagaaatcaggcggtggtaatggaaaaagagttttgtgtttggacttgaacttgacgcctttagagaacgaagatttgaagttggagcttgggaggtttattttctgatttttgttcgtttttctttttagggtatacttgtgtagggtaagtttatt

SEQ ID NO: 276 - protein, 156 aa, Arabidopsis thaliana
  G1889 polypeptide  Paralogous to G354
MERGRSDMEMINNMANCLILLSKAHQNDTKSRVFACKTCNKEFPSFQALGGHRASHRRSAALEGHAPPSPKRVKPVKHECPICGAEFAVGQALGGHMRKHRGGSGGGGGRSLAPATAPVTMKKSGGGNGKRVLCLDLNLTPLENEDLKLELGRFIF

SEQ ID NO: 277 - DNA, 1323 bp, Arabidopsis thaliana
  G1940; predicted polypeptide sequence is paralogous to G2854
tcgactttgtccgtcgtagtgatgcagcaaccaccgtcaaacgccgccggagctggacagataccatcaggacaacagcatttgtggatgatgatgcaacagcagcagcagcagcagcagatgcagttgtctgcggcgccactaggtcaacatcagtacggtattggatctcagaatccaggatccgctagcgatgttaagtcgttgtggatcggagacttgcagcaatggatggacgagaactacatcatgagcgtctttgctcagtctggcgaggctacatcagctaaagtcattcgtaataagctgacgggacaatctgaaggttatggattcattgagttcgtcagccactctgtagcagagcgggttttgcagacttacaatggtgctcccatgccgagcactgaacagacgtttaggctcaactgggctcaggctggggctggagagaaacgattccagactgaagggcctgaccataccattttcgtaggtgacttggcacctgaggtgactgactatatgctctcggacacattcaagaatgtgtatgggtctgtcaaaggggctaaagttgtgcttgacaggaccactggaaggtccaaggggtatgggtttgttagggttgcggatgaaaatgagcagatgcgtgccatgactgaaatgaatggtcaatactgctcgacaaggcctatgcgtattggtccggctgccaataagaatgctcttccgatgcaaccagctatgtatcaaaacactcaaggagcaaatgctggagataatgatcctaataacacaacaatttttgttggaggtctggatgctaatgttacagacgatgaattaaagtcaatttttggtcaatttggtgaacttcttcatgtgaaaatacctccaggaaaacgttgtggattcgttcaatatgccaacaaggcgtctgcagagcatgcactttcggtgctgaatggaacacaattaggtggacaaagcatccgtctttcgtggggacgtagtccaaacaagcagtctgatcaagcgcaatggaacggtggtggatactatggataccctccacagccacagggcggctatggttatgcagctcaaccaccaactcaagaccctaatgcgtactatggtggttacactggctatggcaactatcagcagcaacgtcagtgaaacatcaacatcagctatttctaccaatgtcttggaacaaaagatgagcgattgtgtcttattaggacttctagattaaaagtgctctctttttgtttgagttttattttgcaaatgagtcgatcttgaatttgctat

SEQ ID NO: 278 - protein, 387 aa, Arabidopsis thaliana
  G1940 polypeptide; paralogous to G2854
MQQPPSNAAGAGQIPSGQQHLWMMMQQQQQQQQMQLSAAPLGQHQYGIGSQNPGSASDVKSLWIGDLQQWMDENYIMSVFAQSGEATSAKVIRNKLTGQSEGYGFIEFVSHSVAERVLQTYNGAPMPSTEQTFRLNWAQAGAGEKRFQTEGPDHTIFVGDLAPEVTDYMLSDTFKNVYGSVKGAKVVLDRTTGRSKGYGFVRVADENEQMRAMTEMNGQYCSTRPMRIGPAANKNALPMQPAMYQNTQGANAGDNDPNNTTIFVGGLDANVTDDELKSIFGQFGELLHVKIPPGKRCGFVQYANKASAEHALSVLNGTQLGGQSIRLSWGRSPNKQSDQAQWNGGGYYGYPPQPQGGYGYAAQPPTQDPNAYYGGYTGYGNYQQQRQ

SEQ ID NO: 279 - DNA, 513 bp, Arabidopsis thaliana
  G1974  Predicted polypeptide sequence is paralogous to G354
atggttgctgaaagtgataatcgtgatctgacggtggatacggcggcgagctgtctgatgttgttatcaggaattggagaacacgacggaagaaagaaacgtgttttccgatgcaagacttgtgagagagacttcgattcgttccaagctttaggaggccaccgtgcaagccactcgaaactaaccaacagtgacgataaatcacttcctggatcaccaaagaagaagcctaaaactacgactacgacgacggctcatacttgtccgatttgtggcttggagtttccgatgggacaagctcttggtggtcacatgaggaaacataggaacgagaaagaacgagaaaaggcttctaacgtattggttacgcattctttcatgccggagacgacaacggtgacgactttgaagaaatcgagtagtgggaagagagtggcgtgtttggatttcgacttaacttcggtggagagctttgtcaacacggaattggagttgggaagaacgatgtactga

SEQ ID NO: 280 - protein, 170 aa, Arabidopsis thaliana
  G1974 polypeptide  Paralogous to G354
MVAESDNRDLTVDTAASCLMLLSGIGEHDGRKKRVFRCKTCERDFDSFQALGGHRASHSKLTNSDDKSLPGSPKKKPKTTTTTTAHTCPICGLEFPMGQALGGHMRKHRNEKEREKASNVLVTHSFMPETTTVTTLKKSSSGKRVACLDFDLTSVESFVNTELELGRTMY

SEQ ID NO: 281 - DNA, 1383 bp, Arabidopsis thaliana
  G2153 Predicted polypeptide sequence is paralogous to G1073
ttcttgcttagtatcattctttgtcgtgttcttttaattaaccttttgcaatttgtcttgtgtttctcacaacacaaaaacttgtaaaagtgttaaaaaatcaagatctgaaaaatcttatcaccgcttctaggtttttcagttttttttcttccttttcctgatctaaattaacttatatttcttagggtttcacttcttgaaacatttaatcagaattaattaacctctctagggctttcatggcgaatccatggtggacaggacaagtgaacctatccggcctcgaaacgacgccgcctggttcctctcagttaaagaaaccagatctccacatctccatgaacatggccatggactcaggtcacaataatcatcaccatcaccaagaagtcgataacaacaacaacgacgacgatagagacaacttgagtggagacgaccacgagccacgtgaaggagccgtagaagcccccacgcgccgtccacgtggacgtcctgctggttccaagaacaaaccaaagccaccgatcttcgtcactcgcgattctccaaatgctctcaagagccatgtcatggagatcgctagtgggactgacgtcatcgaaaccctagctacttttgctaggcggcgtcaacgtggcatctgcatcttgagcggaaatggcacagtggctaacgtcaccctccgtcaaccctcgaccgctgccgttgcggcggctcctggtggtgcggctgttttggctttacaagggaggtttgagattctttctttaaccggttctttcttgccaggaccggctccacctggttccaccggtttaacgatttacttagccggtggtcaaggtcaggttgttggaggaagcgtggtgggcccattgatggcagcaggtccggtgatgctgatcgccgccacgttctctaacgcgacttacgagagattgccattggaggaggaagaggcagcagagagaggcggtggtggaggcagcggaggagtggttccggggcagctcggaggcggaggttcgccactaagcagcggtgctggtggaggcgacggtaaccaaggacttccggtgtataatatgccgggaaatcttgtttctaatggtggcagtggtggaggaggacagatgagcggccaagaagcttatggttgggctcaagctaggtcaggattttaacgtgcgttaaaatggtttttaatttacagaagttaacaataagattataatgatgtttattatgatgatgaaaaccagtcagttgctacttgttactagtgagctatatagtttgtggacattatattatgttctctcttgactatgattattatttgctaaatttcacttagctaaaaaaaaaaaaaaaaaa

SEQ ID NO: 282 - protein, 315 aa, Arabidopsis thaliana
  G2153 polypeptide  Paralogous to G1073
MANPWWTGQVNLSGLETTPPGSSQLKKPDLHISMNMAMDSGHNNHHHHQEVDNNNNDDDRDNLSGDDHEPREGAVEAPTRRPRGRPAGSKNKPKPPIFVTRDSPNALKSHVMEIASGTDVIETLATFARRRQRGICILSGNGTVANVTLRQPSTAAVAAAPGGAAVLALQGRFEILSLTGSFLPGPAPPGSTGLTIYLAGGQGQVVGGSVVGPLMAAGPVMLIAATFSNATYERLPLEEEEAAERGGGGGSGGVVPGQLGGGGSPLSSGAGGGDGNQGLPVYNMPGNLVSNGGSGGGGQMSGQEAYGWAQARSGF

SEQ ID NO: 283 - DNA, 653 bp, Arabidopsis thaliana
  G2583  Predicted polypeptide sequence is paralogous to G975
caaatcagaaaatatagagtttgaaggaaactaaaagatggtacattcgaggaagttccgaggtgtccgccagcgacaatggggttcttgggtctctgagattcgccatcctctattgaagagaagagtgtggcttggaactttcgaaacggcagaagcggctgcaagagcatacgaccaagcggctcttctaatgaacggccaaaacgctaagaccaatttccctgtcgtaaaatcagaggaaggctccgatcacgttaaagatgttaactctccgttgatgtcaccaaagtcattatctgagcttttgaacgctaagctaaggaagagctgcaaagacctaacgccttctttgacgtgtctccgtcttgatactgacagttcccacattggagtttggcagaaacgggccgggtcgaaaacaagtccgacttgggtcatgcgcctcgaacttgggaacgtagtcaacgaaagtgcggttgacttagggttgactacgatgaacaaacaaaacgttgagaaagaagaagaagaagaagaagctattattagtgatgaggatcagttagctatggagatgatcgaggagttgctgaattggagttgacttttgactttaacttgttgcaagtccacaaggggtaagggttttc

SEQ ID NO: 284 - protein, 189 aa, Arabidopsis thaliana
  G2583 polypeptide  Paralogous to G975
MVHSRKFRGVRQRQWGSWVSEIRHPLLKRRVWLGTFETAEAAARAYDQAALLMNGQNAKTNFPVVKSEEGSDHVKDVNSPLMSPKSLSELLNAKLRKSCKDLTPSLTCLRLDTDSSHIGVWQKRAGSKTSPTWVMRLELGNVVNESAVDLGLTTMNKQNVEKEEEEEEAIISDEDQLAMEMIEELLNWS

SEQ ID NO: 285 - DNA, 341 bp, Arabidopsis thaliana; identical to SEQ ID NO: 233
  G682; Predicted polypeptide sequence is paralogous to G226

SEQ ID NO: 286 - protein, 77 aa, Arabidopsis thaliana; identical to SEQ ID NO: 234
  G682; polypeptide paralogous to G226

SEQ ID NO: 287 - DNA, 407 bp, Arabidopsis thaliana
  G226 Predicted polypeptide sequences is paralogous to G682
ccagtagttatggataataccaaccgtcttcgtcttcgtcgcggtcccagtcttaggcaaactaagttcactcgatcccgatatgactctgaagaagtgagtagcatcgaatgggagtttatcagtatgaccgaacaagaagaagatctcatctctcgaatgtacagacttgtcggtaataggtgggatttaatagcaggaagagtcgtaggaagaaaggcaaatgagattgagagatactggattatgagaaactctgactatttttctcacaaacgacgacgtcttaataattctccctttttttctacttctcctcttaatctccaagaaaatctaaaattgtaaagaaatcaaaataaaagctttcaatcataaaagtagaacaaatcttgaatgtcttctca

SEQ ID NO: 288 - protein, 112 aa, Arabidopsis thaliana
  G226 polypeptide  Paralogous to G682
MDNTNRLRLRRGPSLRQTKFTRSRYDSEEVSSIEWEFISMTEQEEDLISRMYRLVGNRWDLIAGRVVGRKANEIERYWIMRNSDYFSHKRRRLNNSPFFSTSPLNLQENLKL

SEQ ID NO: 289 - DNA, 832 bp, Arabidopsis thaliana
  G481  Predicted polypeptide sequence is paralogous to G482
gagcgtttcgtagaaaaattcgatttctctaaagccctaaaactaaaacgactatccccaattccaagttctagggtttccatcttccccaatctagtataaatggcggatacgccttcgagcccagctggagatggcggagaaagcggcggttccgttagggagcaggatcgataccttcctatagctaatatcagcaggatcatgaagaaagcgttgcctcctaatggtaagattggaaaagatgctaaggatacagttcaggaatgcgtctctgagttcatcagcttcatcactagcgaggccagtgataagtgtcaaaaagagaaaaggaaaactgtgaatggtgatgatttgttgtgggcaatggcaacattaggatttgaggattacctggaacctctaaagatatacctagcgaggtacagggagttggagggtgataataagggatcaggaaagagtggagatggatcaaatagagatgctggtggcggtgtttctggtgaagaaatgccgagctggtaaaagaagttgcaagtagtgattaagaacaatcgccaaatgatcaagggaaattagagatcagtgagttgtttatagttgagctgatcgacaactatttcgggtttactctcaatttcggttatgttagtttgaacgtttggtttattgtttccggtttagttggttgtatttaaagatttctctgttagatgttgagaacacttgaatgaaggaaaaatttgtccacatcctgttgttattttcgattcactttcggaatttcatagctaatttattctcatttaataccaaatccttaaattaa

SEQ ID NO: 290 - protein, 141 aa, Arabidopsis thaliana
  G481 polypeptide  Paralogous to G482
MADTPSSPAGDGGESGGSVREQDRYLPIANISRIMKKALPPNGKIGKDAKDTVQECVSEFISFITSEASDKCQKEKRKTVNGDDLLWAMATLGFEDYLEPLKIYLARYRELEGDNKGSGKSGDGSNRDAGGGVSGEEMPSW

SEQ ID NO: 291 - DNA, 1065 bp, Arabidopsis thaliana
  G482  Predicted polypeptide sequence is paralogous to G481
tcgacccacgcgtccggacacttaacaattcacaccttctctttttactcttcctaaaaccctaaatttcctcgcttcagtcttcccactcaagtcaaccaccaattgaattcgatttcgaatcattgatggaaatgatttgaaaaaagagtaaagtttatttttttattccttgtaattttcagaaatgggggattccgacagggattccggtggagggcaaaacgggaacaaccagaacggacagtcctccttgtctccaagagagcaagacaggttcttgccgatcgctaacgtcagccggatcatgaagaaggccttgcccgccaacgccaagatctctaaagatgccaaagagacgatgcaggagtgtgtctccgagttcatcagcttcgtcaccggagaagcatctgataagtgtcagaaggagaagaggaagacgatcaacggagacgatttgctctgggctatgactactctaggttttgaggattatgttgagccattgaaagtttacttgcagaggtttagggagatcgaaggggagaggactggactagggaggccacagactggtggtgaggtcggagagcatcagagagatgctgtcggagatggcggtgggttctacggtggtggtggtgggatgcagtatcaccaacatcatcagtttcttcaccagcagaaccatatgtatggagccacaggtggcggtagcgacagtggaggtggagctgcctccggtaggacaaggacttaacaaagattggtgaagtggatctctctctgtatatagatacataaatacatgtatacacatgcctatttttacgacccatataaggtatctatcatgtgatagaacgaacattggtgttggtgatgtaaaatcagatgtgcattaagggtttagattttgaggctgtgtaaaagaagatcaagtgtgctttgttggacaataggattcactaacgaatctgcttcattggatcttgtatgtaactaaagccattgtattgaatgcaaatgttttcatttgggatgctttaaaaaaaaaaaaaaaaa

SEQ ID NO: 292 - protein, 190 aa, Arabidopsis thaliana
  G482 polypeptide  Paralogous to G481
MGDSDRDSGGGQNGNNQNGQSSLSPREQDRFLPIANVSRIMKKALPANAKISKDAKETMQECVSEFISFVTGEASDKCQKEKRKTINGDDLLWAMTTLGFEDYVEPLKVYLQRFREIEGERTGLGRPQTGGEVGEHQRDAVGDGGGFYGGGGGMQYHQHHQFLHQQNHMYGATGGGSDSGGGAASGRTRT

SEQ ID NO: 293 - DNA, 684 bp, Arabidopsis thaliana
  G485  Predicted polypeptide sequence is paralogous to G481 and G482
cctctctgatccaacggacccaaaacatctatctctctttctcgaccttttgtctcctcgatctaaagatggcggattcggacaacgattcaggaggacacaaagacggtggaaatgcttcgacacgtgagcaagataggtttctaccgatcgctaacgttagcaggatcatgaagaaagcacttcctgcgaacgcaaaaatctctaaggatgctaaagaaacggttcaagagtgtgtatcggaattcataagtttcatcaccggtgaggcttctgacaagtgtcagagagagaagaggaagacaatcaacggtgacgatcttctttgggcgatgactacgctagggtttgaggactacgtggagcctctcaaggtttatctgcaaaagtatagggaggtggaaggagagaagactactacggcagggagacaaggcgataaggaaggtggaggaggaggcggtggagctggaagtggaagtggaggagctccgatgtacggtggtggcatggtgactacgatgggacatcaattttcccatcatttttcttaattgtaaaatgataaaagcaaattttcatttttattaattaatgatatatatatatatatgtttaacttttagtataatgtttacagaattttttttttaaaactaggttcaacccactaacgtaacagcg

SEQ ID NO: 294 - protein, 161 aa, Arabidopsis thaliana
  G485 polypeptide  Paralogous to G481 and G482
MADSDNDSGGHKDGGNASTREQDRFLPIANVSRIMKKALPANAKISKDAKETVQECVSEFISFITGEASDKCQREKRKTINGDDLLWAMTTLGFEDYVEPLKVYLQKYREVEGEKTTTAGRQGDKEGGGGGGGAGSGSGGAPMYGGGMVTTMGHQFSHHFS

SEQ ID NO: 295 - DNA, 476 bp, Arabidopsis thaliana
  G486  functionally related and homologous to G481 and G482
gcgagagctgatagattcactgaaacaaaagagaaaaatgacagacgaagatagattgttgccaatagccaatgtagggagacttatgaagcaaatcctaccatcaaatgcaaagatctcaaaagaagcaaaacaaacagttcaagaatgtgcaacagagttcataagctttgttacatgcgaagcatcagagaagtgccacagggagaatcggaagacggtgaatggagacgacatctggtgggctctcagcactctcggcctcgataactatgctgacgccgtgggtaggcatcttcacaagtaccgtgaagccgagagagaaagaactgagcacaacaaaggtagcaatgatagtgggaatgagaaagaaaccaacactagaagtgatgtacagaaccaatcgacaaaatttattagagttgttgagaagggaagcagctcctcggcccgttgaactagacatctaagttctg

SEQ ID NO: 296 - protein, 139 aa, Arabidopsis thaliana
  G486 polypeptide  functionally related and homologous to G481 and G482
MTDEDRLLPIANVGRLMKQILPSNAKISKEAKQTVQECATEFISFVTCEASEKCHRENRKTVNGDDIWWALSTLGLDNYADAVGRHLHKYREAERERTEHNKGSNDSGNEKETNTRSDVQNQSTKFIRVVEKGSSSSAR

SEQ ID NO: 297 - DNA, 1473 bp, Arabidopsis thaliana
  G1067 Predicted polypeptide sequence is paralogous to G1073
tctcaagcttctctctcctttttttcccatagcacatcagaatcgctaaatacgactcctatgcaaagaagaagctacttctttctcttgccctaattaatctacctaactagggtttcctcttacctttcatgagagagatcatttaacataagtcaccttttttatatcttttgcttcgtctttaatttagttctgttcttggtctgtttctatattttgtcggcttgcgtaaccgatcacaccttaatgctttagctattgtttcctcaaaatcatgagttttgacttctcgatctgagttttctttttctctctttacgctcttcttcacctagctaccaatatatgaacgagcaggatcaagaatcgagaaattgatttgagctggcgaataagcagtggtgggatagggaattagtagatgcggcggcgatggaaggcggttacgagcaaggcggtggagcttctagatacttccataacctctttagaccggagattcaccaccaacagcttcaaccgcagggcgggatcaatcttatcgaccagcatcatcatcagcaccagcaacatcaacaacaacaacaaccgtcggatgattcaagagaatctgaccattcaaacaaagatcatcatcaacagggtcgacccgattcagacccgaatacatcaagctcagcaccgggaaaacgtccacgtggacgtccaccaggatctaagaacaaagccaagccaccgatcatagtaactcgtgatagccccaacgcgcttagatctcacgttcttgaagtatctcctggagctgacatagttgagagtgtttccacgtacgctaggaggagagggagaggcgtctccgttttaggaggaaacggcaccgtatctaacgtcactctccgtcagccagtcactcctggaaatggcggtggtgtgtccggaggaggaggagttgtgactttacatggaaggtttgagattctttcgctaacggggactgttttgccacctcctgcaccgcctggtgccggtggtttgtctatatttttagccggagggcaaggtcaggtggtcggaggaagcgttgtggctccccttattgcatcagctccggttatactaatggcggcttcgttctcaaatgcggttttcgagagactaccgattgaggaggaggaagaagaaggtggtggtggcggaggaggaggaggaggagggccaccgcagatgcaacaagctccatcagcatctccgccgtctggagtgaccggtcagggacagttaggaggtaatgtgggtggttatgggttttctggtgatcctcatttgcttggatggggagctggaacaccttcaagaccacctttttaattgaattttaatgtccggaaatttatgtgtttttatcatcttgaggagtcgtctttcctttgggatatttggtgtttaatgtttagttgatatgcatatttt

SEQ ID NO: 298 - protein, 311 aa, Arabidopsis thaliana
  G1067 polypeptide Paralogous to G1073
MEGGYEQGGGASRYFHNLFRPEIHHQQLQPQGGINLIDQHHHQHQQHQQQQQPSDDSRESDHSNKDHHQQGRPDSDPNTSSSAPGKRPRGRPPGSKNKAKPPIIVTRDSPNALRSHVLEVSPGADIVESVSTYARRRGRGVSVLGGNGTVSNVTLRQPVTPGNGGGVSGGGGVVTLHGRFEILSLTGTVLPPPAPPGAGGLSIFLAGGQGQVVGGSVVAPLIASAPVILMAASFSNAVFERLPIEEEEEEGGGGGGGGGGGPPQMQQAPSASPPSGVTGQGQLGGNVGGYGFSGDPHLLGWGAGTPSRPPF

SEQ ID NO: 299 - DNA, 1295 bp, Arabidopsis thaliana
  G1070  Functionally related and homologous to G1073
tcgaccagcttggatttcgttgttcatcattactactctctttcttcttctagctagctagttttgacagcaaaataagaagcaaaaaaaaggtcaactaaaaaagatctgttcttagatcactctcttcttctttttttgatccaattccaccattgaatcatagatcatggatccagtacaatctcatggatcacaaagctctctacctcctcctttccacgcaagagactttcaattacatcttcaacaacagcaacaagagttcttcctccaccatcaccagcaacaaagaaaccaaaccgatggtgaccaacaaggaggatcaggaggaaaccgacaaatcaagatggatcgtgaagagacaagcgacaacatagacaacatagctaacaacagcggtagtgaaggtaaagacatagatatacacggtggttcaggagaaggaggtggtggctccggaggagatcatcagatgacaagaagaccaagaggaagaccagcgggatccaagaacaaaccaaaaccaccgattatcatcacacgggacagcgcaaacgcgcttagaacccacgtgatggagatcggagatggctgcgacttagtcgaaagcgttgccacttttgcacgaagacgccaacgcggcgtttgcgttatgagcggtactggaaatgttactaacgtcactatacgtcagcctggatctcatccttctcctggctcggtagttagtcttcacggaaggttcgagattctatctctctcaggatcttttctccctcctccggctcctcctacagccaccggattgagtgtttacctcgctggaggacaaggacaggtggttggaggaagcgtagttggtccgttgttatgtgctggtcctgtcgttgtcatggctgcgtcttttagcaatgcggcgtacgaaaggttgcctttagaggaagatgagatgcagacgccggttcatggcggaggaggaggaggatcattggagtcgccgccaatgatgggacaacaactgcaacatcagcaacaagctatgtcaggtcatcaagggttaccacctaatcttcttggttcggttcagttgcagcagcaacatgatcagtcttattggtcaacgggacgaccaccgtattgatcaaatatacacacacactcataatcgttgctagctagctaacgatgaatcatgagtttagtggatatatatatgattaaaagaggttagcttatgaacattaataagagtttggattctatcgagcttcattatgtttgggtcatcgttc

SEQ ID NO: 300 - protein, 324 aa, Arabidopsis thaliana
  G1070 polypeptide  Functionally related and homologous to G1073
MDPVQSHGSQSSLPPPFHARDFQLHLQQQQQEFFLHHHQQQRNQTDGDQQGGSGGNRQIKMDREETSDNIDNIANNSGSEGKDIDIHGGSGEGGGGSGGDHQMTRRPRGRPAGSKNKPKPPIIITRDSANALRTHVMEIGDGCDLVESVATFARRRQRGVCVMSGTGNVTNVTIRQPGSHPSPGSVVSLHGRFEILSLSGSFLPPPAPPTATGLSVYLAGGQGQVVGGSVVGPLLCAGPVVVMAASFSNAAYERLPLEEDEMQTPVHGGGGGGSLESPPMMGQQLQHQQQAMSGHQGLPPNLLGSVQLQQQHDQSYWSTGRPPY

SEQ ID NO: 301 - DNA, 974 bp, Arabidopsis thaliana
  G1073 reference sequence
ccccccgacctgcctctacagagacctgaagattccagaaccccacctgatcaaaaataacatggaacttaacagatctgaagcagacgaagcaaaggccgagaccactcccaccggtggagccaccagctcagccacagcctctggctcttcctccggacgtcgtccacgtggtcgtcctgcaggttccaaaaacaaacccaaacctccgacgattataactagagatagtcctaacgtccttagatcacacgttcttgaagtcacctccggttcggacatatccgaggcagtctccacctacgccactcgtcgcggctgcggcgtttgcattataagcggcacgggtgcggtcactaacgtcacgatacggcaacctgcggctccggctggtggaggtgtgattaccctgcatggtcggtttgacattttgtctttgaccggtactgcgcttccaccgcctgcaccaccgggagcaggaggtttgacggtgtatctagccggaggtcaaggacaagttgtaggagggaatgtggctggttcgttaattgcttcgggaccggtagtgttgatggctgcttcttttgcaaacgcagtttatgataggttaccgattgaagaggaagaaaccccaccgccgagaaccaccggggtgcagcagcagcagccggaggcgtctcagtcgtcggaggttacggggagtggggcccaggcgtgtgagtcaaacctccaaggtggaaatggtggaggaggtgttgctttctacaatcttggaatgaatatgaacaattttcaattctccgggggagatatttacggtatgagcggcggtagcggaggaggtggtggcggtgcgactagacccgcgttttagagttttagcgttttggtgacaccttttgttgcgtttgcgtgtttgacctcaaactactaggctactagctatagcggttgcgaaatgcgaatattaggtt

SEQ ID NO: 302 - protein, 270 aa, Arabidopsis thaliana
  G1073 polypeptide reference sequence
MELNRSEADEAKAETTPTGGATSSATASGSSSGRRPRGRPAGSKNKPKPPTIITRDSPNVLRSHVLEVTSGSDISEAVSTYATRRGCGVCIISGTGAVTNVTIRQPAAPAGGGVITLHGRFDILSLTGTALPPPAPPGAGGLTVYLAGGQGQVVGGNVAGSLIASGPVVLMAASFANAVYDRLPIEEEETPPPRTTGVQQQQPEASQSSEVTGSGAQACESNLQGGNGGGGVAFYNLGMNMNNFQFSGGDIYGMSGGSGGGGGGATRPAF

SEQ ID NO: 303 - DNA, 1084 bp, Arabidopsis thaliana
  G1075 Functionally related and homologous to G1073
tttgtgtttggtgctggcatggctggtctcgatctaggcacaacttctcgctacgtccacaacgtcgatggtggcggcggcggacagttcaccaccgacaaccaccacgaagatgacggtggcgctggaggaaaccaccatcatcaccatcataatcataatcaccatcaaggtttagatttaatagcttctaatgataactctggactaggcggcggtggaggaggagggagcggtgacctcgtcatgcgtcggccacgtggccgtccagctggatcgaagaacaaaccgaagccgccggtgattgtcacgcgcgagagcgcaaacactcttagggctcacattcttgaagttggaagtggctgcgacgttttcgaatgtatctccacttacgctcgtcggagacagcgcgggatttgcgttttatccgggacgggaaccgtcactaacgtcagcatccgtcagcctacggcggccggagctgttgtgactctgcggggtacttttgagattctttccctctccggatcttttcttccgccacctgctcctccaggggcgactagcttgacgatattcctcgctggagctcaaggacaggtcgtcggaggtaacgtagttggtgagttaatggcggcggggccggtaatggtcatggcagcgtcttttacaaacgtggcttacgaaaggttgcctttggacgagcatgaggagcacttgcaaagtggcggcggcggaggtggagggaatatgtactcggaagccactggcggtggcggagggttgcctttctttaatttgccgatgagtatgcctcagattggagttgaaagttggcaggggaatcacgccggcgccggtagggctccgttttagcaatttaagaaactttaattgttttttccacttttttgtttttctccgaattttatgaaattatgatttaagaaaaaaaacgatattgttcatgtattgaccctcttactgcatggtttcttctattgggttaattggctagctcataagaattgtttaatttggttattgtcatcaaatttgcccacatataaagcttctagcaaat

SEQ ID NO: 304 - protein, 285 aa, Arabidopsis thaliana
  G1075 polypeptide Functionally related and homologous to G1073
MAGLDLGTTSRYVHNVDGGGGGQFTTDNHHEDDGGAGGNHHHHHHNHNHHQGLDLIASNDNSGLGGGGGGGSGDLVMRRPRGRPAGSKNKPKPPVIVTRESANTLRAHILEVGSGCDVFECISTYARRRQRGICVLSGTGTVTNVSIRQPTAAGAVVTLRGTFEILSLSGSFLPPPAPPGATSLTIFLAGAQGQVVGGNVVGELMAAGPVMVMAASFTNVAYERLPLDEHEEHLQSGGGGGGGNMYSEATGGGGGLPFFNLPMSMPQIGVESWQGNHAGAGRAPF

SEQ ID NO: 305 - DNA, 1342 bp, Arabidopsis thaliana
  G1076  Functionally related and homologous to G1073
attttagtcttcctataacttcttctcaatcctctctcatatcttttttcttagtttaaatttcaataaaatagaaaaaaacatatacaaatctacagagaagagaagctttattttaatcttgtgtgtgtgtgtgtgttttatataatttttattttttttcaaattaaaatctcttctttgcttttgatgtgggcatggctggtcttgatctaggcacagcttttcgttacgttaatcaccagctccatcgtcccgatctccaccttcaccacaattcctcctccgatgacgtcactcccggagccgggatgggtcatttcaccgtcgacgacgaagacaacaacaacaaccatcaaggtcttgacttagcctctggtggaggatcaggaagctctggaggaggaggaggtcacggcgggggaggagacgtcgttggtcgtcgtccacgtggcagaccaccgggatccaagaacaaaccgaaacctccggtaattatcacgcgcgagagcgcaaacactctaagagctcacattcttgaagtaacaaacggctgcgatgttttcgactgcgttgcgacttatgctcgtcggagacagcgagggatctgcgttctgagcggtagcggaacggtcacgaacgtcagcatacgtcagccatctgcggctggagcggttgtgacgctacaaggaacgttcgagattctttctctctccggatcgtttcttcctcctccggcacctcccggagcaacgagtttgacaattttcttagccggaggacaaggtcaggtggttggaggaagcgttgtgggtgagcttacggcggctggaccggtgattgtgattgcagcttcgtttactaatgttgcttatgagagacttcctttagaagaagatgagcagcagcaacagcttggaggaggatctaacggcggaggtaatttgtttccggaggtggcagctggaggaggaggaggacttccgttctttaatttaccgatgaatatgcaaccaaatgtgcaacttccggtggaaggttggccggggaattccggtggaagaggtcctttctgatgtgtatatattgataatcattatatatataccggcggagaagcttttccggcgaagaatttgcgagagtgaagaaaggttagaaaagcttttaatggactaatgaatttcaaattatcatcgtgatttcggacattgtcttgttcatcatgttaagcttaggtttattttttgtcgtttgtagaattttatgtttgaatccttttttttttctgtgaaactctattgtgttcgtctgcgaaggaaaaaaaaattctcaaaaaaaa

SEQ ID NO: 306 - protein, 292 aa, Arabidopsis thaliana
  G1076 polypeptide  Functionally related and homologous to G1073
MAGLDLGTAFRYVNHQLHRPDLHLHHNSSSDDVTPGAGMGHFTVDDEDNNNNHQGLDLASGGGSGSSGGGGGHGGGGDVVGRRPRGRPPGSKNKPKPPVIITRESANTLRAHILEVTNGCDVFDCVATYARRRQRGICVLSGSGTVTNVSIRQPSAAGAVVTLQGTFEILSLSGSFLPPPAPPGATSLTIFLAGGQGQVVGGSVVGELTAAGPVIVIAASFTNVAYERLPLEEDEQQQQLGGGSNGGGNLFPEVAAGGGGGLPFFNLPMNMQPNVQLPVEGWPGNSGGRGPF

SEQ ID NO: 307 - DNA, 483 bp, Arabidopsis thaliana
  G1248  Functionally related and homologous to G481 and G482
atggcggggaattatcattcgttccaaaatccaatccctcgataccagaattacaacttcgggagcagctcatctaatcatcaacatgaacatgatgggttagtggtggtggtggaggatcaacagcaagaagaaagcatgatggtaaaagaacaagacaggctacttccgatagcaaacgtaggaaggatcatgaagaacatcctcccagcaaacgcaaaggtctctaaagaagccaaagagactatgcaagaatgtgtgtccgagttcattagcttcgtcacgggagaagcatccgataaatgccacaaggagaagcgaaagaccgttaatggagacgatatctgttgggctatggctaatctagggtttgatgattacgccgcccagctcaagaagtacttacatcgttaccgagttctcgaaggtgagaaacctaatcatcacggcaaaggaggacctaaatcctcgccagataattaa

SEQ ID NO: 308 - protein, 160 aa, Arabidopsis thaliana
  G1248 polypeptide  Functionally related and homologous to G481 and G482
MAGNYHSFQNPIPRYQNYNFGSSSSNHQHEHDGLVVVVEDQQQEESMMVKEQDRLLPIANVGRIMKNILPANAKVSKEAKETMQECVSEFISFVTGEASDKCHKEKRKTVNGDDICWAMANLGFDDYAAQLKKYLHRYRVLEGEKPNHHGKGGPKSSPDN

SEQ ID NO: 309 - DNA, 823 bp, Arabidopsis thaliana
  G1364 Predicted polypeptide sequence is paralogous to G481 and G482
ctcttctctcgatctctctccctctctgcctcctctcttcctccaatcaacaaacacctctctgtttcactcccgccctttttcgaattcttctgatggcggagtcgcaggccaagagtcccggaggctgtggaagccatgagagtggtggagatcaaagtcccaggtcgttacatgttcgtgagcaagataggtttcttccgattgctaacataagccgtatcatgaaaagaggtcttcctgctaatgggaaaatcgctaaagatgctaaggagattgtgcaggaatgtgtctctgaattcatcagtttcgtcaccagcgaagcgagtgataaatgtcaaagagagaaaaggaagactattaatggagatgatttgctttgggcaatggctactttaggatttgaagactacatggaacctctcaaggtttacctgatgagatatagagagatggagggtgacacaaagggatcagcaaaaggtggggatccaaatgcaaagaaagatgggcaatcaagccaaaatggccagttctcgcagcttgctcaccaaggtccttatgggaactctcaagctcagcagcatatgatggttccaatgccgggaacagactagtatgagaggagtattcaactttggttatgttccaccaaaagaggttatcttatctgtatattatttgtgttgtaagagttttgctatgcagaacttgtgactataatcatctcattgttttgttttgtttttgtttccttggatttgttctgaatatgtcatcaagtcagtcagtctatttatatatttggtttgttgattatttc

SEQ ID NO: 310 - protein, 173 aa, Arabidopsis thaliana
  G1364 polypeptide Paralogous to G481 and G482
MAESQAKSPGGCGSHESGGDQSPRSLHVREQDRFLPIANISRIMKRGLPANGKIAKDAKEIVQECVSEFISFVTSEASDKCQREKRKTINGDDLLWAMATLGFEDYMEPLKVYLMRYREMEGDTKGSAKGGDPNAKKDGQSSQNGQFSQLAHQGPYGNSQAQQHMMVPMPGTD

SEQ ID NO: 311 - DNA, 757 bp, Arabidopsis thaliana
  G1781 Functionally related and homologous to G481 and G482
cgtcgaccagattgatcacatgtggttaacatcaatcaaaaaaaaaaacaaagagatagagatatgactgaggagagcccagaagaagatcatgggtctcctggagtagctgaaacaaatccaggaagcccttcttcaaagaccaacaacaacaacaacaacaacaaagaacaagaccggtttcttcccattgcgaatgtcggaaggatcatgaaaaaagttcttcccggtaacggtaagatctcaaaagacgctaaagaaaccgttcaagaatgtgtctcggagttcattagtttcgtcactggtgaagcttctgacaagtgtcaaagagaaaagaggaagaccatcaatggagatgatatcatttgggctatcacaactctcggtttcgaagactacgtggctccattaaaggtctacctctgcaaatatagagacaccgaaggagagaaagttaacagcccaaaacaacaacaacaaagacaacaacaacagcagattcaacaacagaatcatcataattatcagtttcaagaacaagaccaaaacaataacaacatgtcatgtactagttacatctctcatcatcatccttctccattcctaccagtggatcatcaaccttttcccaatattgctttctctcctaaatcattgcagaaacagttcccgcagcagcatgataataacattgattcaattcactggtgagagagacatttgcttgcgggccgctctaggcgggaaaagcccgaat

SEQ ID NO: 312 - protein, 215 aa, Arabidopsis thaliana
  G1781 polypeptide  Functionally related and homologous to G481 and G482
MTEESPEEDHGSPGVAETNPGSPSSKTNNNNNNNKEQDRFLPIANVGRIMKKVLPGNGKISKDAKETVQECVSEFISFVTGEASDKCQREKRKTINGDDIIWAITTLGFEDYVAPLKVYLCKYRDTEGEKVNSPKQQQQRQQQQQIQQQNHHNYQFQEQDQNNNNMSCTSYISHHHPSPFLPVDHQPFPNIAFSPKSLQKQFPQQHDNNIDSIHW

SEQ ID NO: 313 - DNA, 318 bp, Arabidopsis thaliana
  G1816  Predicted polypeptide sequence is paralogous to G682 and G226
atggataacactgaccgtcgtcgccgtcgtaagcaacacaaaatcgccctccatgactctgaagtgagcagtatcgaatgggagtttatcaacatgactgaacaagaagaagatctcatctttcgaatgtacagacttgtcggtgataggtgggatttgatagcaggaagagttcctggaagacaaccagaggagatagagagatattggataatgagaaacagtgaaggctttgctgataaacgacgccagcttcactcatcttcccacaaacataccaagcctcaccgtcctcgcttttctatctatccttcctag

SEQ ID NO: 314 - protein, 105 aa, Arabidopsis thaliana
  G1816 polypeptide  Paralogous to G682 and G226
MDNTDRRRRRKQHKIALHDSEVSSIEWEFINMTEQEEDLIFRMYRLVGDRWDLIAGRVPGRQPEEIERYWIMRNSEGFADKRRQLHSSSHKHTKPHRPRFSIYPS

SEQ ID NO: 315 - DNA, 1130 bp, Arabidopsis thaliana
  G1945 Functionally related and homologous to G1073
atttcccaaagggatttacgaaaagtccctctcctctatcatctctttattcaccccataccaacaacctctacatcttcttcttcttcttcctcctcttttattttctttttaaatcatttacacaaaaatccaaagacaaatctgaaatctctaataaacaaatccataaaataagaaaaacaaagatgaaaggtgaatacagagagcaaaagagtaacgaaatgttttccaagcttcctcatcatcaacaacaacagcaacaacaacaacaacaacactctcttacctctcacttccacctctcctccaccgtaacccccaccgtcgatgactcctccatcgaagtggtccgacgtccacgtggcagaccaccaggttccaaaaacaaacctaaaccacccgtcttcgtcacacgtgacaccgaccctcctatgagtccttacatcctcgaagttccttcaggaaacgacgtcgtcgaagccatcaaccgtttctgccgccgtaaatccatcggagtctgcgtccttagtggctctggctctgtagctaacgtcactttacgtcagccatcaccggcagctcttggctctaccataactttccatggaaagtttgatctcctctccgtctccgcaacgtttctccctcctccgcctcgtacttccttgtctcctcccgtttctaacttcttcaccgtctctctcgctggacctcaaggacaaatcatcggagggttcgtcgctggtccacttatttcggcaggaacagtttacgtcatcgccgcaagtttcaacaacccttcttatcaccggttaccggcggaagaagagcaaaaacactcggcggggacaggggaaagagagggacaatctccgccggtctctggtggcggtgaagagtcaggacagatggcgggaagtggaggagagtcgtgtggggtatcaatgtacagttgccacatgggtggctctgatgttatttgggcccctacagccagagctccaccgccatactaaccaatccttctttcacaaatctctttctttctttttttgtttttttttgttttgggttaggatgaatcaagaaactagggttttttttttttttttttaaaaaaaaaaaaa

SEQ ID NO: 316 - protein, 276 aa, Arabidopsis thaliana
  G1945 polypeptide Functionally related and homologous to G1073
MKGEYREQKSNEMFSKLPHHQQQQQQQQQQHSLTSHFHLSSTVTPTVDDSSIEVVRRPRGRPPGSKNKPKPPVFVTRDTDPPMSPYILEVPSGNDVVEAINRFCRRKSIGVCVLSGSGSVANVTLRQPSPAALGSTITFHGKFDLLSVSATFLPPPPRTSLSPPVSNFFTVSLAGPQGQIIGGFVAGPLISAGTVYVIAASFNNPSYHRLPAEEEQKHSAGTGEREGQSPPVSGGGEESGQMAGSGGESCGVSMYSCHMGGSDVIWAPTARAPPPY

SEQ ID NO: 317 - DNA, 1050 bp, Arabidopsis thaliana
  G2155 Functionally related and homologous to G1073
ctcatatataccaaccaaacctctctctgcatctttattaacacaaaattccaaaagattaaatgttgtcgaagctccctacacagcgacacttgcacctctctccctcctctccctccatggaaaccgtcgggcgtccacgtggcagacctcgaggttccaaaaacaaacctaaagctccaatctttgtcaccattgaccctcctatgagtccttacatcctcgaagtgccatccggaaacgatgtcgttgaagccctaaaccgtttctgccgcggtaaagccatcggcttttgcgtcctcagtggctcaggctccgttgctgatgtcactttgcgtcagccttctccggcagctcctggctcaaccattactttccacggaaagttcgatcttctctctgtctccgccactttcctccctcctctacctcctacctccttgtcccctcccgtctccaatttcttcaccgtctctctcgccggacctcaggggaaagtcatcggtggattcgtcgctggtcctctcgttgccgccggaactgtttacttcgtcgccactagtttcaagaacccttcctatcaccggttacctgctacggaggaagagcaaagaaactcggcggaaggggaagaggagggacaatcgccgccggtctctggaggtggtggagagtcgatgtacgtgggtggctctgatgtcatttgggatcccaacgccaaagctccatcgccgtactgaccacaaatccatctcgttcaaactagggtttcttcttctttagatcatcaagaatcaacaaaaagattgcatttttagattctttgtaatatcataattgactcactctttaatctctctatcacttcttctttagctttttctgcagtgtcaaacttcacatatttgtagtttgatttgactatccccaagttttgtattttatcatacaaatttttgcctgtctctaatggttgttttttcgtttgtataatcttatgcattgtttattggagctccagagattgaatgtataatataatggtttaat

SEQ ID NO: 318 - protein, 225 aa, Arabidopsis thaliana
  G2155 polypeptide  Functionally related and homologous to G1073
MLSKLPTQRHLHLSPSSPSMETVGRPRGRPRGSKNKPKAPIFVTIDPPMSPYILEVPSGNDVVEALNRFCRGKAIGFCVLSGSGSVADVTLRQPSPAAPGSTITFHGKFDLLSVSATFLPPLPPTSLSPPVSNFFTVSLAGPQGKVIGGFVAGPLVAAGTVYFVATSFKNPSYHRLPATEEEQRNSAEGEEEGQSPPVSGGGGESMYVGGSDVIWDPNAKAPSPY

SEQ ID NO: 319 - DNA, 1361 bp, Arabidopsis thaliana
  G2156 Predicted polypeptide sequence is paralogous to G1073
ttttttttccctttcctcgttcaaaaaaagtacttgcagagtcactcactctcagtctcagcacatgaattaatttgaagcttccctagaattctttcacatcaattaatacgacaccgtctcgggtgaagaatctctcctctcttgccctaaagcgagttagggtttaacacacaaagcataccctttagatttgtgtctcttagctctgtttttgtcggcttgtgtaaccgatcaactcaagctattggctcctcacctcctgaaatttgacttctccaatggatctcaaagtttctcttatatgaattctatcttcaccctcacaatatctttatatatatgagccacaagaacaagaagagtcagtagatgcggctgccatggacggtggttacgatcaatccggaggagcttctagatactttcacaacctcttcaggcctgagcttcatcaccagcttcaacctcagcctcaacttcaccctttgcctcagcctcagcctcaacctcagcctcagcagcagaattcagatgatgaatctgactccaacaaggatccgggttccgacccagttacctctggttcaaccgggaaacgtccacgtggacgtcctccgggatccaagaacaagccgaagccaccggtgatagtgactagagatagccccaacgtgcttagatctcatgttcttgaagtctcatctggagccgacatagtcgagagcgttaccacttacgctcgcaggagaggaagaggagtctccattctcagtggtaacggcacggtggctaacgtcagtctccggcagccggcaacgacagcggctcatggggcaaatggtggaaccggaggtgttgtggctctacatggaaggtttgagatactttccctcacaggtacggtgttgccgccccctgcgccgccaggatccggtggtctttctatctttctttccggcgttcaaggtcaggtgattggaggaaacgtggtggctccgcttgtggcttcgggtccagtgatactaatggctgcatcgttctctaatgcaactttcgaaaggcttccccttgaagatgaaggaggagaaggtggagagggaggagaagttggagagggaggaggaggagaaggtggtccaccgccggccacgtcatcatcaccaccatctggagccggtcaaggacagttaagaggtaacatgagtggttatgatcagtttgccggtgatcctcatttgcttggttggggagccgcagccgcagccgcaccaccaagaccagccttttagaattgaaaattatgtccgtaacatagctgtaaccaaatttcatttctcaaaattaaaagaaaaaaaaaa

SEQ ID NO: 320 - protein, 302 aa, Arabidopsis thaliana
  G2156 polypeptide Paralogous to G1073
MDGGYDQSGGASRYFHNLFRPELHHQLQPQPQLHPLPQPQPQPQPQQQNSDDESDSNKDPGSDPVTSGSTGKRPRGRPPGSKNKPKPPVIVTRDSPNVLRSHVLEVSSGADIVESVTTYARRRGRGVSILSGNGTVANVSLRQPATTAAHGANGGTGGVVALHGRFEILSLTGTVLPPPAPPGSGGLSIFLSGVQGQVIGGNVVAPLVASGPVILMAASFSNATFERLPLEDEGGEGGEGGEVGEGGGGEGGPPPATSSSPPSGAGQGQLRGNMSGYDQFAGDPHLLGWGAAAAAAPPRPAF

SEQ ID NO: 321 - DNA, 813 bp, Arabidopsis thaliana
  G2345 Predicted polypeptide sequence is paralogous to G481 and G482
cttctccagcgtcggatcagatcagatcaaatctctctctccatctccgtctcctcctccaatcatcatttctctctccgtctcccgctctttttcgaattctccttcttcttcagggtttctgagatggccgaatcgcaaaccggtggtggtggtggtggaagccatgagagtggcggtgatcagagcccgaggtctttgaatgttcgtgagcaggacaggtttcttccgattgctaacataagccgtatcatgaagagaggtttacctctaaatggcaaaatcgctaaagatgctaaagagactatgcaggaatgtgtctctgaattcatcagcttcgtcaccagcgaggctagtgataagtgccaaagagagaaaaggaagaccatcaatggagatgatttgctttgggctatggccactttaggattcgaagattacatcgatcccctcaaggtttacctgatgcgatatagagagatggagggtgacactaaaggatcaggaaaaggcggggaatcgagtgcaaagagagatggtcaaccaagccaagtgtctcagttctcgcaggttcctcaacaaggctcattctcacagggtccttatggaaactctcaatctctgaggttcggcaatagcatcgagcatcttgaagtgttaatgagtagtactaggacactattcatcacaatcttccgagactcgactatgcctgttgtgtctgagaatctgagtgatccactttccatagatatggattgtgaagctatttatcaccacttcattggcctgttgattctttcatgcaagtga

SEQ ID NO: 322 - protein, 228 aa, Arabidopsis thaliana
  G2345 polypeptide  Paralogous to G481 and G482
MAESQTGGGGGGSHESGGDQSPRSLNVREQDRFLPIANISRIMKRGLPLNGKIAKDAKETMQECVSEFISFVTSEASDKCQREKRKTINGDDLLWAMATLGFEDYIDPLKVYLMRYREMEGDTKGSGKGGESSAKRDGQPSQVSQFSQVPQQGSFSQGPYGNSQSLRFGNSIEHLEVLMSSTRTLFITIFRDSTMPVVSENLSDPLSIDMDCEAIYHHFIGLLILSCK

SEQ ID NO: 323 - DNA, 1424 bp, Arabidopsis thaliana
  G2657  Functionally related and homologous to G1073
gaaaataaaaccttaccaaatcaatcaaagaataagatgaagaacaaaattccagcttgatgtattttgtgaaaacattattattcttttcctcttctatctagagtctctcctaggtcaaattatcaaaatcaattctcatctcaacatagaatggatccagttcaatctcatggatcacaaagctctcttcctcctcctttccatgctagagatttccaattacatcttcaacaacaacaacaacatcaacaacaacatcaacaacaacaacaacaacagttctttctccaccatcatcagcaaccacaaagaaaccttgatcaagatcacgagcagcaaggagggtcaatattgaatagatctatcaagatggatcgcgaagagacaagcgataacatggacaacatcgctaataccaacagcggtagcgaaggtaaagagatgagtttacacggaggagaaggaggaagcggtggtggaggaagtggagaacagatgacaagaaggccaagaggaagaccagcaggatccaagaacaaacctaaagctccaataatcataacaagagacagcgcaaacgcgcttcgaactcacgtcatggagataggagacggatgtgacatagttgactgtatggctacgttcgctagacgccgccaaagaggcgtttgcgttatgagcggtacaggaagcgttactaacgtcactatacgtcagcctggatcgccacctggctcggtggttagccttcacggccggtttgaaatcctctctctttcgggatctttcttgcctccgcctgcgccgcctgcagccaccggactaagcgtttacctagccggaggacaagggcaggtcgttggaggtagtgtggtgggacctttgttgtgttcgggtcctgtggtggttatggcggcttcttttagcaatgcggcgtacgaaaggctgcctttggaagaagatgagatgcagacgccagttcaaggaggcggtggaggaggaggaggtggtggtggaatgggatctcccccgatgatgggacagcaacaagctatggcagctatggcggcggctcaaggactaccaccgaatcttcttggttcggttcagttgccaccgccacaacagaatgatcagcagtattggtctacgggtcggccaccgtattgattattagattgctattattatatatacatgatcaatggaatatatacatatatagctatgtatttgtatatatgtagctatttactaatagatcttacatatatataaagcaagctaacatggaatcattaaaaggaggtctacgaagtatgacgtgaagttgaagacggcgataatattgaagatcaacaattcagtagatggttttcaggttcttctttgttttttttgtttcctttgggttcgtttta

SEQ ID NO: 324 - protein, 339 aa, Arabidopsis thaliana
  G2657 polypeptide  Functionally related and homologous to G1073
MDPVQSHGSQSSLPPPFHARDFQLHLQQQQQHQQQHQQQQQQQFFLHHHQQPQRNLDQDHEQQGGSILNRSIKMDREETSDNMDNIANTNSGSEGKEMSLHGGEGGSGGGGSGEQMTRRPRGRPAGSKNKPKAPIIITRDSANALRTHVMEIGDGCDIVDCMATFARRRQRGVCVMSGTGSVTNVTIRQPGSPPGSVVSLHGRFEILSLSGSFLPPPAPPAATGLSVYLAGGQGQVVGGSVVGPLLCSGPVVVMAASFSNAAYERLPLEEDEMQTPVQGGGGGGGGGGGMGSPPMMGQQQAMAAMAAAQGLPPNLLGSVQLPPPQQNDQQYWSTGRPPY

SEQ ID NO: 325 - DNA, 252 bp, Arabidopsis thaliana
  G2718  Predicted polypeptide sequence is paralogous to G481 and G482
atgaatacgcagcgtaagtcgaagcatcttaagaccaatccaaccattgttgcctcttcttctgaagaagtgagcagtcttgagtgggaagaaatagcaatggctcaggaagaagaggatttgatttgcaggatgtataagcttgtcggtgaaaggtgggatttaatagctgggaggattccaggaagaacagcagaagagattgagaggttttgggtgatgaagaatcatcgaagatctcaattacgttga

SEQ ID NO: 326 - protein, 83 aa, Arabidopsis thaliana
  G2718 polypeptide  Paralogous to G481 and G482
MNTQRKSKHLKTNPTIVASSSEEVSSLEWEEIAMAQEEEDLICRMYKLVGERWDLIAGRIPGRTAEEIERFWVMKNHRRSQLR

SEQ ID NO: 327 - DNA, 321 bp, Oryza sativa (japonica cultivar-group)
  G3392 Predicted polypeptide sequence is orthologous to G682
gctctaaactaccataaaatcttaactcggcattttttttttcacgctaatggaaagtagcggtggaagccagctgggaaagaattccaaaacaagtgatggtcgtgaaacaaaagaagttaatagcactgcgcaaaattttgttcatttcacagaagaagaggaagatattgttttcagaatgcacaggcttgtcgggaacaggtgggaacttatagctggaagaataccgggaaggacagcagaagaagtagagaagttctgggcaattaaacatcaagccacatgatagcagaaagaggatgtttgccccaaaagtag

SEQ ID NO: 328 - protein, 79 aa, Oryza sativa (japonica cultivar-group)
  G3392 polypeptide  Orthologous to G682
MESSGGSQLGKNSKTSDGRETKEVNSTAQNFVHFTEEEEDIVFRMHRLVGNRWELIAGRIPGRTAEEVEKFWAIKHQAT

SEQ ID NO: 329 - DNA, 356 bp, Oryza sativa (japonica cultivar-group)
  G3393 Predicted polypeptide sequence is orthologous to G682
cataaggtcataacaagggtctgaggatcttagctagcacaagatctcaactcggcatttcattggagtttttcacgcctaatggatagcagcagtggtagccagggaaagaattccaaaaccagtgatggttgtgaaacaaaagaagttaataacactgcacagaattttgttcatttcacggaagaagaggaagatctcgttttcagaatgcacaggcttgttgggaacaggtgggaacttatagctggaagaatccctggaagaacagcaaaagaggtagaaatgttctgggcagtaaagcaccagaatacataaggggggaaaaagggtgtatgccctaaaagtagcgtaca

SEQ ID NO: 330 - protein, 78 aa, Oryza sativa (japonica cultivar-group)
  G3393 polypeptide  Orthologous to G682
MDSSSGSQGKNSKTSDGCETKEVNNTAQNFVHFTEEEEDLVFRMHRLVGNRWELIAGRIPGRTAKEVEMFWAVKHQNT

SEQ ID NO: 331 - DNA, 1231 bp, Oryza sativa (japonica cultivar-group)
  G3394  Predicted polypeptide sequence is orthologous to G481 and G482
ggccgcttctcttctccagcgtccgatctccccctctcgcctctccgcctcacctccgctccgcttcccacccccgcttcctctctctctcctctccccccccctctctctctctctctctctctctctctcctcctcgcttcaccacctcgcgcccaacccccctctctctcctctccacgtcgcgccctctccgcgcgcgcccgcgcttctatataaggaggggggaggtgggatggcggatgggccggggagcccggggggaggaggggggagccacgagagcgggagcccgagggggggagggggaggagggggaggtgggggtggggggggcccactcgtccggcaggacaggttcctccccatcgccaacatcagccgcatcatgaagaaggccatcccggccaacgggaagatcgccaaggacgccaaggagaccgtgcaggagtgcgtctccgagttcatctccttcatcaccagcgaggcgagcgataaatgccagagggagaagcgcaagaccatcaacggcgacgacttgctgtgggcgatggccacgctgggcttcgaggactacatcgagcccctcaaggtctacctgcagaagtacagagagatggagggtgatagtaaattaactgcaaaggctggtgatggctctgtgaaaaaggatgtacttggttctcatggaggaagcagttcaagtgcccaagggatgggccaacaagcagcatacaatcaaggaatgggttatatgcaacctcagtaccataatggggatgtctcaaactgaagataggaccttttcatgcaactgttgctaggtggattttatttggtgctgcagtcgttagctaatatatatacctacacctcatggtgagcagtgaaggaagtaacttgctaccacctctaggtcccatgtttgtcaaccaggaactgatgctgcttggaagcgtcgagccaaggctgcttctcagatgtaaattactccccgtgaggatagtttcggttcgtggtctagctctgttgttgtatgtatattcaggataatttaacaattggtctttggctgtcattcggttccatataatctgtattgggaggcataaatattcatgttgtatttcgtcctgaactagcgtgttgtactattgagaaatagatgctctctgtaatggtagcaattttactctgattcccaaaaaaaaaaaaaaaaaaaaaaaaaaaa

SEQ ID NO: 332 - protein, 185 aa, Oryza sativa (japonica cultivar-group)
  G3394 polypeptide  Orthologous to G481 and G482
MADGPGSPGGGGGSHESGSPRGGGGGGGGGGGGGPLVRQDRFLPIANISRIMKKAIPANGKIAKDAKETVQECVSEFISFITSEASDKCQREKRKTINGDDLLWAMATLGFEDYIEPLKVYLQKYREMEGDSKLTAKAGDGSVKKDVLGSHGGSSSSAQGMGQQAAYNQGMGYMQPQYHNGDVSN

SEQ ID NO: 333 - DNA, 610 bp, Oryza sativa (japonica cultivar-group)
  G3395  Predicted polypeptide sequence is orthologous to G481 and G482
tggatctagggtttttggagggcggcgcggggatggcggacgcggggcacgacgagagcgggagcccgccgaggagcggcggggtgagggagcaggacaggttcctgcccatcgccaacatcagccgcatcatgaagaaggccgtcccggcgaacggcaagatcgccaaggacgccaaggagaccctgcaggagtgcgtctcggagttcatctccttcgtcaccagcgaggcgagcgacaaatgtcagaaggagaagcgcaagaccatcaacggggaagatctcctctttgcgatgggtacgcttggctttgaggagtacgttgatccgttgaagatctatttacacaagtacagagagatggagggtgatagtaagctgtcctcaaaggctggtgatggttcagtaaagaaggatacaattggtccgcacagtggcgctagtagctcaagtgcgcaagggatggttggggcttacacccaagggatgggttatatgcaacctcagtatcataatggggacacctaaagatgaggatagtgaaaattttcagtaactggtgtcctctgtgagttattatccatctgttaaggaagaacccacattagggc

SEQ ID NO: 334 - protein, 164 aa, Oryza sativa (japonica cultivar-group)
  G3395 polypeptide  Orthologous to G481 and G482
MADAGHDESGSPPRSGGVREQDRFLPIANISRIMKKAVPANGKIAKDAKETLQECVSEFISFVTSEASDKCQKEKRKTINGEDLLFAMGTLGFEEYVDPLKIYLHKYREMEGDSKLSSKAGDGSVKKDTIGPHSGASSSSAQGMVGAYTQGMGYMQPQYHNGDT

SEQ ID NO: 335 - DNA, 837 bp, Oryza sativa (japonica cultivar-group)
  G3396  Predicted polypeptide sequence is orthologous to G481 and G482
gtcgagatccggcggccggtggcgtcctcctccctctccctcctccccaaccaacggcgctgatcccctccgccatctccgtccatctccgcctaaaaaaactaagcgatgtcggaggggttcgacgggacggagaacggcggcggcggcggcggaggcggagtagggaaggagcaggaccggttcctgccgatcgccaacatcggccgcatcatgcgccgggccgtgccggagaacggcaagatcgccaaggactccaaggagtccgtccaggagtgcgtctccgagttcatcagcttcatcaccagcgaagcaagcgacaagtgcctcaaggagaagcgcaagaccatcaatggggacgacctgatctggtcaatgggcacgctcggattcgaggactatgtcgagcctctcaagctctacctcaggctctaccgggagacggagggtgacacaaagggttcaagagcttctgaactgccagtaaagaaagatgttgtacttaatggagatcctggatcatcgtttgaaggcatgtaggacgaggagtgtgatagcatctaggaaggagaaccatcgtttttagggaaagaacgctccagcatcctgttatgttgtaagcaggatgcttctaaagttccaataccttgttaccacgaatgttagtcgtcgttctttttgaaatgttcttgtgttagccaggatgtccaaatttgttgtaggttctagttcagtcgtgtgttgtgtggttgtgtctaaccatatttggccgtttccggctgtcctgcatatgctaaattcagaggggtaaagagatctaagaaaaaaaaaaaaaaa

SEQ ID NO: 336 - protein, 143 aa, Oryza sativa (japonica cultivar-group)
  G3396 polypeptide  Orthologous to G481 and G482
MSEGFDGTENGGGGGGGGVGKEQDRFLPIANIGRIMRRAVPENGKIAKDSKESVQECVSEFISFITSEASDKCLKEKRKTINGDDLIWSMGTLGFEDYVEPLKLYLRLYRETEGDTKGSRASELPVKKDVVLNGDPGSSFEGM

SEQ ID NO: 337 - DNA, 720 bp, Oryza sativa (japonica cultivar-group)
  G3397 Predicted polypeptide sequence is orthologous to G481 and G482
gcgtctgatttgctgaagaggaggaggaggatgccggactcggacaacgactccggcgggccgagcaactacgcgggaggggagctgtcgtcgccgcgggagcaggacaggttcctgccgatcgcgaacgtgagcaggatcatgaagaaggcgctgccggcgaacgccaagatcagcaaggacgccaaggagacggtgcaggagtgcgtctccgagttcatctccttcatcaccggcgaggcctccgacaagtgccagcgcgagaagcgcaagaccatcaacggcgacgacctgctctgggccatgaccaccctcggcttcgaggactacgtcgaccccctcaagcactacctccacaagttccgcgagatcgagggcgagcgcgccgccgcctccaccaccggcgccggcaccagcgccgcctccaccacgccgccgcagcagcagcacaccgccaatgccgccggcggctacgccgggtacgccgccccgggagccggccccggcggcatgatgatgatgatggggcagcccatgtacggctcgccgccaccgccgccacagcagcagcagcagcaacaccaccacatggcaatgggaggaagaggcggcttcggtcatcatcccggcggcggcggcggcgggtcgtcgtcgtcgtcggggcacggtcggcaaaacaggggcgcttgacatcgctccgagacgagtagcatgcaccat

SEQ ID NO: 338 - protein, 219 aa, Oryza sativa (japonica cultivar-group)
  G3397 polypeptide  Orthologous to G481 and G482
MPDSDNDSGGPSNYAGGELSSPREQDRFLPIANVSRIMKKALPANAKISKDAKETVQECVSEFISFITGEASDKCQREKRKTINGDDLLWAMTTLGFEDYVDPLKHYLHKFREIEGERAAASTTGAGTSAASTTPPQQQHTANAAGGYAGYAAPGAGPGGMMMMMGQPMYGSPPPPPQQQQQQHHHMAMGGRGGFGHHPGGGGGGSSSSSGHGRQNRGA

SEQ ID NO: 339 - DNA, 761 bp, Oryza sativa (japonica cultivar-group)
  G3398 Predicted polypeptide sequence is orthologous to G481 and G482
cctctcctcttcgtcttcctcctcgccttcgcttcgactgcttcgatcgagggagatcgaggttgcgatgccggattcggacaacgagtcaggggggccgagcaacgcgggggagtacgcgtcggcgagggagcaggacaggttcctgccgatcgcgaacgtgagcaggatcatgaagagggcgctcccggcgaacgccaagatcagcaaggacgccaaggagacggtgcaggagtgcgtctcggagttcatctccttcatcaccggcgaggcctccgacaagtgccagcgggagaagcgcaagaccatcaacggcgacgacctcctctgggcgatgaccacgctcggcttcgaggactacatcgacccgctcaagctctacctccacaagttccgcgagctcgagggcgagaaggccatcggcgccgccggcagcggcggcggtggcgccgcctcctccggcggctccggctccggctccggctcgcaccaccaccaggatgcttcccggaacaatggcggatacggcatgtacggcggcggcggcggcatgatcatgatgatgggacagcctatgtacggctcgccgccggcgtcgtcagctgggtacgcgcagccgccgccgccccaccaccaccaccaccagatggtgatgggagggaaaggtgcgtatggccatggcggcggcggcggcggcgggccctccccgtcgtcgggatacggccggcaagacaggctatgagcttgctttcttggttggt

SEQ ID NO: 340 - protein, 224 aa, Oryza sativa (japonica cultivar-group)
  G3398 polypeptide  Orthologous to G481 and G482
MPDSDNESGGPSNAGEYASAREQDRFLPIANVSRIMKRALPANAKISKDAKETVQECVSEFISFITGEASDKCQREKRKTINGDDLLWAMTTLGFEDYIDPLKLYLHKFRELEGEKAIGAAGSGGGGAASSGGSGSGSGSHHHQDASRNNGGYGMYGGGGGMIMMMGQPMYGSPPASSAGYAQPPPPHHHHHQMVMGGKGAYGHGGGGGGGPSPSSGYGRQDRL

SEQ ID NO: 341 - DNA, 1160 bp, Oryza sativa (japonica cultivar-group)
  G3399 Predicted polypeptide sequence is orthologous to G1073
cggtgaggagcgagttgtagaggaggaggggcaccgatcaaccgggaagctggcggccgggaagtggtgggagcggccagatgacacggccatggccgggatggaccctggcgggggcggcgccggcgccggcagctcacggtacttccaccatctgctccgaccgcagcagccgtcgccgctgtcaccgctgtcgccgacatcccatgtcaagatggagcactccaagatgtcacccgacaagagccccgtgggcgagggagatcacgcgggagggagtggaagcggcggcgtcggcggtgaccaccagccgtcgtcgtcggccatggtgcccgtcgagggtggcagcggcagcgccggcggtagtggctcgggtgggccgacgcggcgcccgcgcgggcgcccgcccgggtccaagaacaagccgaagccgcccatcatcgtgacgcgcgacagcccgaacgcgctgcactcgcacgtgctcgaggtcgccggcggcgccgacgtcgtcgactgcgtggccgagtacgcccgccgccgagggcgcggcgtgtgcgtgctgagcggcggcggcgccgtcgtcaacgtggcgctgcggcagccgggcgcgtcgccgccgggcagcatggtggccacgctgcggggccggttcgagatcctatctctcacgggcacggtcctgccgcctcccgcgccacccggcgcgagcggcctcaccgtgttcctctccggcggccagggccaggtgatcggcggcagcgtggtgggcccgctggtcgccgcggggcccgtcgtcctgatggcggcctcattcgcgaacgccgtgtacgagcggctgccgctggagggcgaggaagaggaggtcgccgcgcccgccgccggaggcgaagcacaagatcaagtggcacaatcagctggacccccagggcagcaaccggcggcgtcacagtcctccggcgtgacaggaggcgacggcaccggcggcgccggtggcatgtcgctctacaacctcgccgggaatgtgggaggctatcagctccccggagacaacttcggaggttggagcggcgccggcgccggcggagtcaggccaccgttctgacccatgtcttagcatccagttcaaaaattctccaaattaagaattgcgcagtgcaggc

SEQ ID NO: 342 - protein, 336 aa, Oryza sativa (japonica cultivar-group)
  G3399 polypeptide Orthologous to G1073
MAGMDPGGGGAGAGSSRYFHHLLRPQQPSPLSPLSPTSHVKMEHSKMSPDKSPVGEGDHAGGSGSGGVGGDHQPSSSAMVPVEGGSGSAGGSGSGGPTRRPRGRPPGSKNKPKPPIIVTRDSPNALHSHVLEVAGGADVVDCVAEYARRRGRGVCVLSGGGAVVNVALRQPGASPPGSMVATLRGRFEILSLTGTVLPPPAPPGASGLTVFLSGGQGQVIGGSVVGPLVAAGPVVLMAASFANAVYERLPLEGEEEEVAAPAAGGEAQDQVAQSAGPPGQQPAASQSSGVTGGDGTGGAGGMSLYNLAGNVGGYQLPGDNFGGWSGAGAGGVRPPF

SEQ ID NO: 343 - DNA, 1143 bp, Oryza sativa (japonica cultivar-group)
  G3400 Predicted polypeptide sequence is orthologous to G1073
ctctgcaggtgaggtgaggtgaggggtgggatcgagggatcgagaagctggcggcgagcaagtggtgggagcgcgccgatgagggcgccatggccgggatggatcccaccggcggcggtggcggcggcggcgtggcggcgcactacctacacatgctccgcgcgcagcagcaccagccactgtccccggcaggtgacgtcaaggcggagcggtccatgctgtcgccggatgagagccccggcgcggacgccgacctaggatcggaccacccgacgtcgtcggccatggtggcggcggaggacagcggcggcggcagcggttcgggtggcccgatgcggcgcccccgcgggaggccgctgggctccaagaacaagcccaagccgcccatcatcgtgacgcgggacagccccaacgcgttccactcccacgtcctcgaggtcgccgcgggaaccgacatcgtcgagtgcgtctgcgagttcgcgcgccgccgcggccgcggcgtctccgtgctcagcggtggcggcgccgtcgccaacgtcgcgctccgccagccaggcgcgtcgcccccgggcagcctggtcgccaccatgcgcggccagttcgagatcctgtccctcacgggcaccgtcctcccgccgcccgcgccgcccagcgccagcggcctcaccgtcttcctctccggcgggcagggccaggtggtcggcgggagcgtggccggccagctcatcgccgcggggccagtcttcctcatggccgcctcgttcgccaatgccgtctacgagcgtctgccactcgatggggaggatccggaggcagaggctgccgccgccacccctcccggcgatgcggcgcagccaaccggcccaccaccaccgcagcagcagcccacagcctcgcagtcctctgaggtgaccgccggtgacggcggcggcggcggcggtctcggcatgtatcttggaggccatgtgggatcctaccagcagcagcagcagcaacttcccggaccaggagacaacttcggtagctggagcggcagcatcaggccgccgccattctgatccaaacacctcaaatcaagctctcccccaacaacgccatgcatgtctaaatcctcacaagattcactccaagaagacgaagctg

SEQ ID NO: 344 - protein, 322 aa, Oryza sativa (japonica cultivar-group)
  G3400 polypeptide  Orthologous to G1073
MAGMDPTGGGGGGGVAAHYLHMLRAQQHQPLSPAGDVKAERSMLSPDESPGADADLGSDHPTSSAMVAAEDSGGGSGSGGPMRRPRGRPLGSKNKPKPPIIVTRDSPNAFHSHVLEVAAGTDIVECVCEFARRRGRGVSVLSGGGAVANVALRQPGASPPGSLVATMRGQFEILSLTGTVLPPPAPPSASGLTVFLSGGQGQVVGGSVAGQLIAAGPVFLMAASFANAVYERLPLDGEDPEAEAAAATPPGDAAQPTGPPPPQQQPTASQSSEVTAGDGGGGGGLGMYLGGHVGSYQQQQQQLPGPGDNFGSWSGSIRPPPF

SEQ ID NO: 345 - DNA, 1003 bp, Oryza sativa (japonica cultivar-group)
  G3401 Predicted polypeptide sequence is orthologous to G1073
ggatatataggccgcaggtagaagctggcgagccggtggtgggacgaggggcggctcagcctgccggtgacagccgccgacccatccctcggccttggcaacaacgacaccaccggcgccggtgacgacgacatggcgtccaaggagccaagcggcgaccacgaccacgagatgaacgggaccagcgccgggggcggcgagcccaaggacggcgcggtggtgaccggccgcaaccggcgcccccgcggacggccgccgggctccaagaacaagcccaagccgcccatcttcgtgacgcgggacagcccgaacgcgctgcgcagccacgtcatggaggtggccggcggcgccgatgtcgccgagtccatcgcgcacttcgcgcggcggcggcagcgcggcgtctgcgtgctcagcggggccggcaccgtgaccgacgtggccctgcgccagccggccgcgccgagcgccgtggtggcgctccgtgggcggttcgagatcctgtccctgacggggacgttcctgccggggccggcgccgccgggctccaccgggctgaccgtgtacctcgccggcgggcaggggcaggtggtgggcggcagcgtggtggggacgctcaccgcggcggggccggtcatggtgatcgcctccaccttcgccaacgccacctacgagaggctgccgctggatcaggaggaggaggaagcagcggcaggcggcatgatggcgccgccgccactcatggccggcgccgccgatccactacttttcggcgggggaatgcacgacgccgggcttgctgcatggcaccatgcccgccctccgccgccgccgccctactagctctctagctagattaattaattaagcttcatgaattaaatccttgcttaattaattggcatatatatatactcacatgatatatatgatcaacaagctatatatagctagccagctcgagctaattaattaacaaaaggtgagccaatataatgcaagatcg

SEQ ID NO: 346 - protein, 235 aa, Oryza sativa (japonica cultivar-group)
  G3401 polypeptide  Orthologous to G1073
MASKEPSGDHDHEMNGTSAGGGEPKDGAVVTGRNRRPRGRPPGSKNKPKPPIFVTRDSPNALRSHVMEVAGGADVAESIAHFARRRQRGVCVLSGAGTVTDVALRQPAAPSAVVALRGRFEILSLTGTFLPGPAPPGSTGLTVYLAGGQGQVVGGSVVGTLTAAGPVMVIASTFANATYERLPLDQEEEEAAAGGMMAPPPLMAGAADPLLFGGGMHDAGLAAWHHARPPPPPPY

SEQ ID NO: 347 - DNA, 902 bp, Oryza sativa (japonica cultivar-group)
  G3403 Predicted polypeptide sequence is orthologous to G1073
tcgaccagtgcattaattgtgcttctcctggagcagggtcaagctggcgaacaggtcgtggtggtcgggccccatgggcttgccggagcagccgtccggctcgtcgggccccaaggcggagctcccggtggccaaggagccggaggcgagcccgacggggggcgcggcggcggaccacgccgacgagaacaacgaatccggcggcggcgagccgcgggagggcgccgtggtggcggcgcccaaccggcgcccccgcggccgcccgccgggctccaagaacaagccgaagccgcccatcttcgtgacgcgcgacagccccaacgcgctgcgcagccacgtcatggaggtggccggcggcgccgacgtcgccgacgccatcgcgcagttctcgcgccgccgccagcgcggcgtctgcgtgctcagcggcgccgggacggtcgccaacgtcgcgctgcgccagccgtcggcgcccggcgccgtcgtcgccctgcacggccgcttcgagatcctctccctcaccggcaccttcctccccggcccggcgcctccgggctccacggggctcaccgtctacctcgccggcggccagggccaggttgtcggcggcagcgtcgtggggtcgctcatcgccgcgggcccggtcatggtgatcgcgtccacgttcgccaacgccacctacgagcgcctgccattggaggaagaagaggagggctcaggcccgcccatgcccggcggcgccgagcccctcatggccggcggccacggcatcgccgacccttcggcgctgccaatgttcaacctgccgccgagcaacgggctcggcggcggcggcgacggtttcccatgggcggcgcacccccgcccaccgtactgatcgatggcaatagcatggaagattcatt

SEQ ID NO: 348 - protein, 266 aa, Oryza sativa (japonica cultivar-group)
  G3403 polypeptide Orthologous to G1073
MGLPEQPSGSSGPKAELPVAKEPEASPTGGAAADHADENNESGGGEPREGAVVAAPNRRPRGRPPGSKNKPKPPIFVTRDSPNALRSHVMEVAGGADVADAIAQFSRRRQRGVCVLSGAGTVANVALRQPSAPGAVVALHGRFEILSLTGTFLPGPAPPGSTGLTVYLAGGQGQVVGGSVVGSLIAAGPVMVIASTFANATYERLPLEEEEEGSGPPMPGGAEPLMAGGHGIADPSALPMFNLPPSNGLGGGGDGFPWAAHPRPPY

SEQ ID NO: 349 - DNA, 1152 bp, Oryza sativa (japonica cultivar-group)
  G3404 Functionally related and homologous to G1073
accgtgagagagggagacagatggatccggtgacggcggcggcggcgcatgggggtgggcaccaccaccaccaccacttcggagcgccaccggtggcggcgttccaccaccacccgttccaccacggcggcggggcgcactacccggcggcgttccagcagtttcaggaggagcagcagcagcttgtggcggcggcggcggcggctggtgggatggcgaagcaggagctggtggatgagagcaacaacaccatcaacagcggcgggagcaacgggagcggcggggaggagcagaggcagcagtccggggaggagcagcaccagcaaggggcggcggcgccggtggtgatccggcgtcccaggggccgccccgccggctccaagaacaagcccaagcctccggtcatcatcacgcgcgacagcgccagcgcgctgcgggcgcacgtcctcgaggtcgcctccgggtgcgacctcgtcgacagcgtcgccacgttcgcgcgccgccgccaggtcggtgtctgcgtgctcagcgccaccggcgccgtcaccaacgtctccgtccggcagcccggcgcgggccccggcgccgtcgtcaacctcaccggccgcttcgacatcctctcgctgtccggctccttcctcccgccgccggcgcctccctccgccaccggcctcaccgtctacgtctccggcggccaggggcaggtcgtgggcggcacggtcgccggaccgctcatcgccgtcggccccgtcgtcatcatggccgcctcgttcgggaacgccgcctacgagcgcctcccgctcgaggacgacgagccgccgcagcacatggcgggcggcggccagtcctcgccgccgccgccgccgctgccattaccaccacaccagcagccgattcttcaagaccatctgccacacaacctgatgaacggaatccacctccccggcgacgccgcctacggctggaccagcggcggcggcggcggcggccgcgcggcgccgtactgatcaacatcgatctcgccggagagaaaaaaaatggaggagaaggatcggagcgagccgtgcatggtgtaggatgaattaagctaagagttaatttcttcttccgcctttgctaatcatgatgctctcgtgttgtttaatctgtggc

SEQ ID NO: 350 - protein, 328 aa, Oryza sativa (japonica cultivar-group)
  G3404 polypeptide  Functionally related and homologous to G1073
MDPVTAAAAHGGGHHHHHHFGAPPVAAFHHHPFHHGGGAHYPAAFQQFQEEQQQLVAAAAAAGGMAKQELVDESNNTINSGGSNGSGGEEQRQQSGEEQHQQGAAAPVVIRRPRGRPAGSKNKPKPPVIITRDSASALRAHVLEVASGCDLVDSVATFARRRQVGVCVLSATGAVTNVSVRQPGAGPGAVVNLTGRFDILSLSGSFLPPPAPPSATGLTVYVSGGQGQVVGGTVAGPLIAVGPVVIMAASFGNAAYERLPLEDDEPPQHMAGGGQSSPPPPPLPLPPHQQPILQDHLPHNLMNGIHLPGDAAYGWTSGGGGGGRAAPY

SEQ ID NO: 351 - DNA, 1013 bp, Oryza sativa (japonica cultivar-group)
  G3405 Functionally related and homologous to G1073
ctagctaattgattgctagcttgcaaggatggatccggtcacggcatcaatacacggtcaccatcttcctccaccgttcaacacccgcgacttccatcaccatctccagcagcagcagcaccagctgcatctcaagaccgaggatgaccaaggcggcggcactccgggtgtcttcggcagccgcggcaccaagcgcgaccacgacgacgacgagaacagtggcaacggccatggaagcggtggtgacggcggtgacctcgcgctggtacccccctcgggtggcgggccggacggcgccgggagcgagagcgccacgcgccgcccgaggggacgcccggcggggtccaagaacaagccgaagccaccgatcatcatcaccagggacagcgccaacacgctccggacgcacgtcatggaggtggccggcggctgcgacatctccgagagcatcaccacgttcgcgcgacgccggcagcgcggggtttgcgtgctcagcggcgccggcaccgtcactaacgtcacgctgcggcagcccgcatcgcagggagcggtcgttgcgctccacggccggttcgagatactctccctctccggctccttcctcccgccgcccgccccgccggaggccacggggctcaccgtctacctggccggaggccagggccaggtcgtgggcggcagcgtcgtcggcgcgctgaccgcggctgggcctgtggtgataatggcggcgtcttttgcgaacgcggtgtacgagcggctgccgttggaggacgacgagctactggcggctcaagggcaagccgacagcgctgggttgctcgccgcggggcagcaagcggcgcagctcgccggcggggccgtcgatccaagcctcttccaaggactaccaccaaacctactcggaaacgtgcagctgccgccggaagccgcctacggatggaaccctggagccggcggtggccgcccggcgccgttctgagatggatcgattccgcgacagcaacgcagcatag

SEQ ID NO: 352 - protein, 316 aa, Oryza sativa (japonica cultivar-group)
  G3405 polypeptide  Functionally related and homologous to G1073
MDPVTASIHGHHLPPPFNTRDFHHHLQQQQHQLHLKTEDDQGGGTPGVFGSRGTKRDHDDDENSGNGHGSGGDGGDLALVPPSGGGPDGAGSESATRRPRGRPAGSKNKPKPPIIITRDSANTLRTHVMEVAGGCDISESITTFARRRQRGVCVLSGAGTVTNVTLRQPASQGAVVALHGRFEILSLSGSFLPPPAPPEATGLTVYLAGGQGQVVGGSVVGALTAAGPVVIMAASFANAVYERLPLEDDELLAAQGQADSAGLLAAGQQAAQLAGGAVDPSLFQGLPPNLLGNVQLPPEAAYGWNPGAGGGRPAPF

SEQ ID NO: 353 - DNA, 918 bp, Oryza sativa (japonica cultivar-group)
  G3406 Functionally related and homologous to G1073
atggcaggtctcgacctcggcaccgccgcgacgcgctacgtccaccagctccaccacctccaccccgacctccagctgcagcacagctacgccaagcagcacgagccgtccgacgacgaccccaacggcagcggcggcggcggcaacagcaacggcgggccgtacggggaccatgacggcgggtcctcgtcgtcaggtcctgccaccgacggcgcggtcggcgggcccggcgacgtggtggcgcgccggccgcgggggcgcccgcctggctccaagaacaagccgaagccgccggtgatcatcacgcgggagagcgccaacacgctgcgcgcccacatcctggaggtcgggagcggctgcgacgtgttcgagtgcgtctccacgtacgcgcgccggcggcagcgcggcgtgtgcgtgctgagcggcagcggcgtggtcaccaacgtgacgctgcgtcagccgtcggcgcccgcgggcgccgtcgtgtcgctgcacgggaggttcgagatcctgtcgctctcgggctccttcctcccgccgccggctccccccggcgccaccagcctcaccatcttcctcgccgggggccagggacaggtcgtcggcggcaacgtcgtcggcgcgctctacgccgcgggcccggtcatcgtcatcgcggcgtccttcgccaacgtcgcctacgagcgcctcccactggaggaggaggaggcgccgccgccgcaggccggcctgcagatgcagcagcccggcggcggcgccgatgctggtggcatgggtggcgcgttcccgccggacccgtctgccgccggcctcccgttcttcaacctgccgctcaacaacatgcccggtggcggcggctcacagctccctcccggcgccgacggccatggctgggccggcgcacggccaccgttctga

SEQ ID NO: 354 - protein, 305 aa, Oryza sativa (japonica cultivar-group)
  G3406 polypeptide  Functionally related and homologous to G1073
MAGLDLGTAATRYVHQLHHLHPDLQLQHSYAKQHEPSDDDPNGSGGGGNSNGGPYGDHDGGSSSSGPATDGAVGGPGDVVARRPRGRPPGSKNKPKPPVIITRESANTLRAHILEVGSGCDVFECVSTYARRRQRGVCVLSGSGVVTNVTLRQPSAPAGAVVSLHGRFEILSLSGSFLPPPAPPGATSLTIFLAGGQGQVVGGNVVGALYAAGPVIVIAASFANVAYERLPLEEEEAPPPQAGLQMQQPGGGADAGGMGGAFPPDPSAAGLPFFNLPLNNMPGGGGSQLPPGADGHGWAGARPPF

SEQ ID NO: 355 - DNA, 987 bp, Oryza sativa (japonica cultivar-group)
  G3407 Functionally related and homologous to G1073
tcatcatcatcatcacttgcatatcgaattattaataatatcgaagatggcaggccttgatttgggcaccagctacctccaccaccaccaatcactgcatctccgccacgacgatggcggcgccggctccgacgacggcggccacgacgacctctcgccggggagcggcggtggcggcgggcccagcagcacggccggtggcgccgggatcggcggcggcgaggtcgtcgctcgccgcccccgcggccgcccgccgggctccaagaacaagcccaagccgccggtgatcatcaccagggagagcgccaacgcgctcagggcgcatatcctcgaggtagccgccggttgcgatgtgttcgaggcgctgacggcgtacgcgcgccgccggcagcgcggggtgtgcgtgctctcggcggcggggacagtggcgaacgtcacgctccggcagccgcagtcggcgcagcccgggccggcctcgccggcggtggcgacgctgcacggcaggttcgagatactctccctcgcgggctccttcctgcccccgcccgcgccgccgggcgccaccagcctcgccgcgttcctcgccggcgggcaggggcaggtcgtcggtggcagcgtcgccggcgcgctcatcgcggcggggcccgtcgtcgtcgtcgccgcgtcgttcagcaacgtggcgtacgagaggctgccgctcgaggacggcgacgaggtggtccccccggcgccggcagggagcgaccagggcggcggcggcagcggcggcatgccaccattaggcgttgatccgtcgggcggcgccgccaccggtgggctcccgttcttcaacatgccgttcgggatgccgccaatgccggtggacggccacgccggctggcctggcgccggcgtcgggaggccaccgttctcatgatggatggatccccatattccggcgagcggccggcggcgaggtggtcggcaagattgaagacatggacatgg

SEQ ID NO: 356 - protein, 289 aa, Oryza sativa (japonica cultivar-group)
  G3407 polypeptide  Functionally related and homologous to G1073
MAGLDLGTSYLHHHQSLHLRHDDGGAGSDDGGHDDLSPGSGGGGGPSSTAGGAGIGGGEVVARRPRGRPPGSKNKPKPPVIITRESANALRAHILEVAAGCDVFEALTAYARRRQRGVCVLSAAGTVANVTLRQPQSAQPGPASPAVATLHGRFEILSLAGSFLPPPAPPGATSLAAFLAGGQGQVVGGSVAGALIAAGPVVVVAASFSNVAYERLPLEDGDEVVPPAPAGSDQGGGGSGGMPPLGVDPSGGAATGGLPFFNMPFGMPPMPVDGHAGWPGAGVGRPPFS

SEQ ID NO: 357 - DNA, 1064 bp, Oryza sativa (japonica cultivar-group)
  G3408 Functionally related and homologous to G1073
gtggttttggttgattgctactctgtgccatgtcgttctgcgagagggacatgaacaaggagagcatgtaccaagaacgggacgacatggcggggatacggttcgcgacgccgccgctgcctcagcagcagcagcagcagcagctggtggagtgcttctccgacgaggtggacagccgcgggagtggcggcgagatgaaggatgccgtggggagcgggagtgggcagctggtcgttgttggtggcggggatggggcgagcatcgaggtggcgaagaagaggagggggaggccgccggggtccaagaacaagccgaagccacccgtggtgatcacgcgggaggcggagccggcggcggcgatgcggccgcacgtgatcgagatccccggcgggcgggacgtcgcggaggcgctcgcgcggttctcgagccgtcggaacctcgggatctgcgtgctcgccggcaccggcgcggtcgccaacgtgtcgctccgccacccgtcacccggggtcccgggctcagctccggctgcgatcgtgttccacggccggtacgagatcctctccctgtcggccacgttcctgcctccggccatgtcctccgtggcgccccaggccgcggtcgccgccgcgggcctctccatctcgctcgccggcccgcacggccagatcgtcggcggggccgtggcaggcccgctctacgccgcgaccaccgtcgtggtcgtcgccgccgccttcaccaaccccaccttccaccgcctccccgccgacgacgacgcgtcggtgtccgtctcggtgtcactctccggcagcggcgacgcggacgaacaccggggccaccagcacaaacctgagccgcaagaaccgcgccaacttcgacggccgccaccgcacctgtcagcagccgccgccgtctcagcagcacagccggtggagccatgcggcgcgcccatgtacgcctgccaccctcagccacaggaggtgatgtggccgccgccggctcgtacgccgcacccgccgccgccgccgccgtactaatccgaccgaattggtacgccattgccacat

SEQ ID NO: 358 - protein, 334 aa, Oryza sativa (japonica cultivar-group)
  G3408 polypeptide  Functionally related and homologous to G1073
MSFCERDMNKESMYQERDDMAGIRFATPPLPQQQQQQQLVECFSDEVDSRGSGGEMKDAVGSGSGQLVVVGGGDGASIEVAKKRRGRPPGSKNKPKPPVVITREAEPAAAMRPHVIEIPGGRDVAEALARFSSRRNLGICVLAGTGAVANVSLRHPSPGVPGSAPAAIVFHGRYEILSLSATFLPPAMSSVAPQAAVAAAGLSISLAGPHGQIVGGAVAGPLYAATTVVVVAAAFTNPTFHRLPADDDASVSVSVSLSGSGDADEHRGHQHKPEPQEPRQLRRPPPHLSAAAAVSAAQPVEPCGAPMYACHPQPQEVMWPPPARTPHPPPPPPY

SEQ ID NO: 359 - DNA, 920 bp, Oryza sativa (japonica cultivar-group)
  G3429 Predicted polypeptide sequence is orthologous to G481 and G482
ccaggtcattgagacttgagagacatggcagggaacaaaaagcgtggtatagtagtatagtcagtactaggattagtacttgataactagcacaacaaaaagctactatcatttttgcattcaaagtggtaattaagaatcggatgatcattttgattgttcctcttcatttgttttggatgtcaggtggcaggaacatggatcaggtcaagaaggcggcagtgagatcggatggggtgggaggtagtgcgaccaacgccgagctgccgatggccaacctcgtacgcctgataaagaaggtgctcccagggaaagcgaagatcgggggagcagccaagggtctcacccatgattgcgcggtggagttcgtcgggttcgtcggcgacgaggcctccgagaaggccaaggcagagcaccgccgcaccgtagcgccggaagactacttgggctcattcggcgaccttggcttcgatcgctacgtcgaccccatggatgcctacatccatggttaccgtgagtttgagagggctggtgggaataggagggtggcgccgcctcctccggcggcagctacaccgctgacgcccggtggaccgacattcactgacgcagagctgcagtttctccggtcggtgatcccctccagaagtgatgatgaatatagcggctcatcaccagccataggcggctatggctatggatatggctatggaaaaaatatgtgaacaacttgatgcatgtgtgtgtgtacactgcatgcatgcgtggagggtcaaacagagtcaagactcttgtggtggtttcaataagtctctagtgacaatataagttgtgtatcgttgtttcctttgtaaaaaaaaaaacgtcatgtatcgttgtgtgtcctcatccggtaatcctttacgtgggtgggttatggc

SEQ ID NO: 360 - protein, 193 aa, Oryza sativa (japonica cultivar-group)
  G3429 polypeptide  Orthologous to G481 and G482
MIILIVPLHLFWMSGGRNMDQVKKAAVRSDGVGGSATNAELPMANLVRLIKKVLPGKAKIGGAAKGLTHDCAVEFVGFVGDEASEKAKAEHRRTVAPEDYLGSFGDLGFDRYVDPMDAYIHGYREFERAGGNRRVAPPPPAAATPLTPGGPTFTDAELQFLRSVIPSRSDDEYSGSSPAIGGYGYGYGYGKNM

SEQ ID NO: 361 - DNA, 257 bp, Zea mays
  G3431 Predicted polypeptide sequence is orthologous to G682
ctaatggatagcagcagtggtagccaggacaagaaattcagagacaatgatcgccctgaagcaaaagaagctaatagcaccgcacagcatcttgttgacttcacggaagcagaggaagatcttgtttccagaatgcacaggcttgtggggaacaggtgggagattatagcaggaagaatcccaggaaggacagcagaagaggtagagatgttctggtccaaaaaataccaggaaagatgaaaccgaggccttagatt

SEQ ID NO: 362 - protein, 78 aa, Zea mays
  G3431 polypeptide  Orthologous to G682
MDSSSGSQDKKFRDNDRPEAKEANSTAQHLVDFTEAEEDLVSRMHRLVGNRWEIIAGRIPGRTAEEVEMFWSKKYQER

SEQ ID NO: 363 - DNA, 819 bp, Zea mays
  G3434  Predicted polypeptide sequence is orthologous to G481 and G482
tcgacaagggttgcggcggaggcgcccggtcgctggcgatggccgacgacggcgggagccacgagggcagcggcggcggcggaggcgtccgggagcaggaccggttcctgcccatcgccaacatcagccggatcatgaagaaggccgtcccggccaacggcaagatcgccaaggacgctaaggagaccctgcaggagtgcgtctccgagttcatatcattcgtgaccagcgaggccagcgacaaatgccagaaggagaaacgaaagacaatcaacggggacgatttgctctgggcgatggccactttaggattcgaggagtacgtcgagcctctcaagatttacctacaaaagtacaaagagatggagggtgatagcaagctgtctacaaaggctggcgagggctctgtaaagaaggatgcaattagtccccatggtggcaccagtagctcaagtaatcagttggttcagcatggagtctacaaccaagggatgggctatatgcagccacagtaccacaatggggaaacctaacaaagggctaatacagcagcaatttatgctagggaagtctctgcattgcttaccatgtgtattggcagaaaacaggaggcacttacaaagggtgttaatctctgcgatggctgcctctcaggtgtaaattggcttcggtttagcgctgcttttgtccgtatatttaggatgatttgactgttgctacttttggcaaccttttacatttacagatatgtattattcagcataaatataatatagtagtcctaggcctaaataatggtgattaaaaaaaaaaaaaaaa

SEQ ID NO: 364 - protein, 164 aa, Zea mays
  G3434 polypeptide  Orthologous to G481 and G482
MADDGGSHEGSGGGGGVREQDRFLPIANISRIMKKAVPANGKIAKDAKETLQECVSEFISFVTSEASDKCQKEKRKTINGDDLLWAMATLGFEEYVEPLKIYLQKYKEMEGDSKLSTKAGEGSVKKDAISPHGGTSSSSNQLVQHGVYNQGMGYMQPQYHNGET

SEQ ID NO: 365 - DNA, 735 bp, Zea mays
  G3435 Predicted polypeptide sequence is orthologous to G481 and G482
cggcggtggccttgagctgaggcggcggagcgatgccggactcggacaacgactccggcgggccgagcaacgccgggggcgagctgtcgtcgccgcgggagcaggaccggttcctgcccatcgccaacgtgagccggatcatgaagaaggcgctcccggccaacgccaagatcagcaaggacgccaaggagacggtgcaggagtgcgtgtccgagttcatctccttcatcaccggcgaggcctccgacaagtgccagcgcgagaagcgcaagaccatcaacggcgacgacctgctgtgggccatgaccacgctcggcttcgaggactacgtcgagccgctcaagcactacctgcacaagttccgcgagatcgagggcgagagggccgccgcgtccgccggcgcctcgggctcgcagcagcagcagcagcagggcgagctgcccagaggcgccgccaatgccgccgggtacgccgggtacggcgcgcctggctccggcggcatgatgatgatgatgatggggcagcccatgtacggcggctcgcagccgcagcaacagccgccgccgcctcagccgccacagcagcagcagcaacatcaacagcatcacatggcaataggaggcagaggaggattcggccaacaaggcggcggcggcggctcctcgtcgtcgtcagggcttggccggcaagacagggcgtgagttgcgacgatacgtcagaatcagaatcgctgat

SEQ ID NO: 366 - protein, 222 aa, Zea mays
  G3435 polypeptide  Orthologous to G481 and G482
MPDSDNDSGGPSNAGGELSSPREQDRFLPIANVSRIMKKALPANAKISKDAKETVQECVSEFISFITGEASDKCQREKRKTINGDDLLWAMTTLGFEDYVEPLKHYLHKFREIEGERAAASAGASGSQQQQQQGELPRGAANAAGYAGYGAPGSGGMMMMMMGQPMYGGSQPQQQPPPPQPPQQQQQHQQHHMAIGGRGGFGQQGGGGGSSSSSGLGRQDRA

SEQ ID NO: 367 - DNA, 803 bp, Zea mays
  G3436 Predicted polypeptide sequence is orthologous to G481 and G482
tttgacttgaccggacagtgctgttcggtggctcggccgcgatgccggactccgacaacgagtccggcgggccgagcaacgcggagttctcgtcgccgcgggagcaggaccggttcctgccgatcgcgaacgtgagccggatcatgaagaaggcgctcccggccaacgccaagatctccaaggacgccaaggagacggtgcaggagtgcgtgtcggagttcatctccttcatcaccggcgaggcctccgacaagtgccagcgcgagaagcgcaagaccatcaacggcgacgacctactctgggccatgaccacgctcggcttcgaggactacgtcgagccgctcaagctctacctccacaagttccgcgagctcgagggcgagaaggcggccacgacgagcgcctcctccggcccgcagccgccgctgcacagggagacgacgccgtcgtcgtcaacgcacaatggcgcgggcgggcccgtcgggggatacggcatgtacggcggcgcgggcgggggaagcggtatgatcatgatgatgggacagcccatgtacggcggctccccgccggccgcgtcgtccgggtcgtacccgcaccaccagatggccatgggcggaaaaggtggcgcctatggctacggcggaggctcgtcgtcgtcgccgtcagggctcggcaggtaggacaggttgtgaccgtcgccgtccatgcttgcatggccatggccatggcatggctcccgccgccggcttcttgcttggtgtcggtaattagcgctggtggcctgcgctggttaagttcaccat

SEQ ID NO: 368 - protein, 212 aa, Zea mays
  G3436 polypeptide  Orthologous to G481 and G482
MPDSDNESGGPSNAEFSSPREQDRFLPIANVSRIMKKALPANAKISKDAKETVQECVSEFISFITGEASDKCQREKRKTINGDDLLWAMTTLGFEDYVEPLKLYLHKFRELEGEKAATTSASSGPQPPLHRETTPSSSTHNGAGGPVGGYGMYGGAGGGSGMIMMMGQPMYGGSPPAASSGSYPHHQMAMGGKGGAYGYGGGSSSSPSGLGR

SEQ ID NO: 369 - DNA, 1322 bp, Zea mays
  G3437 Predicted polypeptide sequence is orthologous to G481 and G482
tattgtctatgagggaagcagatcctctacgctgcaattgggccactgacatgtgggaccaggtctagattggacccacacatcaatgaccgaaatgcagaagagggtctcgttgccactgtaagctatctcctagagttcagagcagggcaagaatcttgcaatgctcacatgaacataatataatcgttgtgttagctatgcgtcggcatcactaccgtcctcccactggcatctcccgtctactattttgggacgaacagaacagagacactagctaactagcttattagcttgctcccctccttcctttcaagctttaaaaggagaccatctcttgcaccacctcttcatccatccggccaagcaaggggcatgaagaacaggaagggctacgggcaccagggccacctgctgagccccgtgggcagcccgctgtcggacaacgagtccggcgccgcggcagcggccggcggcggcgggtgcgggagcagcgtggggtactgcggcggcggcggcggtgagtcgccggccaaggagcaagaccggttcctgccgatcgccaacgtgtcgcgcatcatgaagcgctccctgccggcgaacgccaagatctccaaggaggccaaggagacggtgcaggagtgcgtgtccgagttcatcagcttcgtcacgggggaggcctccgacaagtgccagcgcgagaagcgcaagaccatcaacggcgacgacctgctctgggccatgaccacgctcggcttcgaggcctacgtcgccccgctcaagtcctacctcaaccgctaccgcgaggccgagggcgagaaggccgccgtgctcggcggcggcgcgcgccacggcgacggcgcggcgcggcggacgacgccggcccactcgccgcgcaatggcgcgggcgggcccgtcgggggatacggcatgtacggcggcgcgggcgggggaagcggtatgatcatgatgatggggcagcccatgtacggcggctccccgccggccgcgtcgtccgggtcgtacccgcaccaccagatggccatgggcggaaaaggtggcgcctatggctacggcggaggctcgtcgtcgtcgccgtcagggctcggcaggtaggccaggttgtgaccgtcgccgtccatgcttgcatggccatggcatggctcagtcccgccgccggcttcttgcttggtgtcggtaattagcgctggttaagttaaccttcggtttttccccccttttcttttcgtggtaagtaatgttgtgctgaatggagccagtgatatggttaagatagctccataacctctcggtaaaaaaaa

SEQ ID NO: 370 - protein, 246 aa, Zea mays
  G3437 polypeptide  Orthologous to G481 and G482
MKNRKGYGHQGHLLSPVGSPLSDNESGAAAAAGGGGCGSSVGYCGGGGGESPAKEQDRFLPIANVSRIMKRSLPANAKISKEAKETVQECVSEFISFVTGEASDKCQREKRKTINGDDLLWAMTTLGFEAYVAPLKSYLNRYREAEGEKAAVLGGGARHGDGAARRTTPAHSPRNGAGGPVGGYGMYGGAGGGSGMIMMMGQPMYGGSPPAASSGSYPHHQMAMGGKGGAYGYGGGSSSSPSGLGR

SEQ ID NO: 371 - DNA, 268 bp, Zea mays
  G3444 Predicted polypeptide sequence is orthologous to G682
cctaacccctctaatggatagcagcagtggtagccaggacaagaaattcagagacaatgatcgccctgaagcaaaagaagctaatagcaccgcacagcatcttgttgacttcacggaagcagaggaagatcttgtttccagaatgcacaggcttgtggggaacaggtgggagattatagcaggaagaatcccaggaaggacagcagaagaggtagagatgttctggtccaaaaaataccaggaaagatgaaaccgaggccttagattt

SEQ ID NO: 372 - protein, 78 aa, Zea mays; identical to SEQ ID NO: 362
  G3444 polypeptide  Orthologous to G682

SEQ ID NO: 373 - DNA, 302 bp, Glycine max
  G3445 Predicted polypeptide sequence is orthologous to G682
agaacttgttattgcaatgactgacatagatcgctcctctgataatgtttcttctgattctattgagaaatcaagccaagtttctgatgttgaattttctgaagctgaggaaatccttattgccatggtgtataatctggttggagaaaggtggtctttgattgctggaagaattcctggaagaactgcagaagaaatagagaaatattggacttcaagattttcgactagccaatgaagtggcagaaattaaacgaagcaagacaattttgggtgcctgcaactcattatacagtgactta

SEQ ID NO: 374 - protein, 73 aa, Glycine max
  G3445 polypeptide  Orthologous to G682
MTDIDRSSDNVSSDSIEKSSQVSDVEFSEAEEILIAMVYNLVGERWSLIAGRIPGRTAEEIEKYWTSRFSTSQ

SEQ ID NO: 375 - DNA, 257 bp, Glycine max
  G3446 Predicted polypeptide sequence is orthologous to G682
gagaacttgttatgcaatggctgacatagatcgctcctttgataataatgtttctgctgtttctactgagaaatcaagccaagtttcagatgttgaattttctgaagctgaggaaatccttattgccatggtgtataatctggttggggagaggtggtctttgattgctggaagaattcctggaagaactgcagaagagatagagaaatattggacttcaagattttcgactagccaatgatcggtggcagaaaacg

SEQ ID NO: 376 - protein, 74 aa, Glycine max
  G3446 polypeptide  Orthologous to G682
MADIDRSFDNNVSAVSTEKSSQVSDVEFSEAEEILIAMVYNLVGERWSLIAGRIPGRTAEEIEKYWTSRFSTSQ

SEQ ID NO: 377 - DNA, 250 bp, Glycine max
  G3447 Predicted polypeptide sequence is orthologous to G682
gttattgcaatggctgacatagatcgctcctttgataataatgtttctgctgtttctactgagaaatcaagccaagtttcagatgttgaattttctgaagctgaggaaatccttattgccatggtgtataatctggttggggagaggtggtctttgattgctggaagaattcctggaagaactgcagaagagatagagaaatattggacttcaagattttcgactagccaatgatcggtggcagaaaacg

SEQ ID NO: 378 - protein, 74 aa, Glycine max; identical to SEQ ID NO: 376
  G3447 polypeptide  Orthologous to G682

SEQ ID NO: 379 - DNA, 264 bp, Glycine max
  G3448 Predicted polypeptide sequence is orthologous to G682
attctccacgcctccttgcaatggctgactcggatctctcttcaagtcaaatttctacacattctactgattcaggaaatcgagggtcttccaaagttgaattttctgaagatgaggaaaccctcatcatcaggatgtataaactggtaggggagaggtggtctataattgctggaaggattcctggaagaacagcagaggaaatagagaagtattggacttcaagattctcgggctctagtgaatgaagctccggagtactac

SEQ ID NO: 380 - protein, 75 aa, Glycine max
  G3448 polypeptide  Orthologous to G682
MADSDLSSSQISTHSTDSGNRGSSKVEFSEDEETLIIRMYKLVGERWSIIAGRIPGRTAEEIEKYWTSRFSGSSE

SEQ ID NO: 381 - DNA, 268 bp, Glycine max
  G3449 Predicted polypeptide sequence is orthologous to G682
actcttctagctccttgcaatggctgactcggatcgctcttctagtgaagtttctacacattctactgattcagggaagcgagggtcttccaaagttgaattttctgaagatgaggaaactcttatcatcaggatgtataaactggtaggggagaggtggtctttaattgctggaaggattcctggaagaacagcagaggaaatagagaagtattggacttcaagattctcaggttctagtgaatgaggtgccaagagttctactacc

SEQ ID NO: 382 - protein, 75 aa, Glycine max
  G3449 polypeptide  Orthologous to G682
MADSDRSSSEVSTHSTDSGKRGSSKVEFSEDEETLIIRMYKLVGERWSLIAGRIPGRTAEEIEKYWTSRFSGSSE

SEQ ID NO: 383 - DNA, 285 bp, Glycine max
  G3450 Predicted polypeptide sequence is orthologous to G682
cagctcagaaggcaaagatagatccatgtccaccaccgcaactacaacctctgaagaagttagcagcaatgagtggaaagtcatacacatgagcgagcaagaggaggatctcattcgcaggatgtacaagctagtcggggacaagtggaatttgatagctggtcgcattcccggtcgtaaagcagaagaaatagagagattctggattatgagacacggcgatgctttttctgttaaaagaaacggaagtaaaacccaagactcgtgattttctctggtcatgta

SEQ ID NO: 384 - protein, 80 aa, Glycine max
  G3450 polypeptide  Orthologous to G682
MSTTATTTSEEVSSNEWKVIHMSEQEEDLIRRMYKLVGDKWNLIAGRIPGRKAEEIERFWIMRHGDAFSVKRNGSKTQDS

SEQ ID NO: 385 - DNA, 869 bp, Glycine max
  G3456 Predicted polypeptide sequence is orthologous to G1073
tcgacaacttcaacttttgttatggccaaccggtggtggaccgggtcggtgggtctagagaactctggccactcgatgaaaaaaccggatctggggttttccatgaacgagagtacggtgacggggaaccatataggagaagaagatgaggacagagaaaacagcgacgagccaagagagggagctattgacgtcgccaccacgcgccgccctaggggacgtccaccgggctccagaaacaagccgaaaccgccgatattcgtcacccgagacagccctaacgcgctgcggagccacgtcatggagattgccgtcggagccgacatcgccgactgcgtggcgcagttcgctcggaggcgccagcgcggggtttccattctcagcggcagcgggaccgtcgtcaacgtcaatctccggcaacccacggcacccggcgccgtcatggcgctccacggccgcttcgacatcctctccctcaccggctcctttctccctgggccgtcccctcccggcgccaccgggctcacaatctacctcgccggaggccaggggcagatcgtcggcggcggagtggtgggcccgctcgtggcggcgggccccgtattggtaatggcggctactttttccaatgctacgtatgaaagattgcctttagaggatgatgatcaggaacaacacggcggcggaggcggaggaggttcgccgcaggaaaaaaccgggggtcccggcgaggcgtcgtcgtcgatttcggtttataacaataatgttcctccgagtttaggtcttccgaatgggcaacatctgaaccatgaagcttattcttctccttggggtcattctcctcatgccagacctcctttctaattagc

SEQ ID NO: 386 - protein, 262 aa, Glycine max
  G3456 polypeptide Orthologous to G1073
MKKPDLGFSMNESTVTGNHIGEEDEDRENSDEPREGAIDVATTRRPRGRPPGSRNKPKPPIFVTRDSPNALRSHVMEIAVGADIADCVAQFARRRQRGVSILSGSGTVVNVNLRQPTAPGAVMALHGRFDILSLTGSFLPGPSPPGATGLTIYLAGGQGQIVGGGVVGPLVAAGPVLVMAATFSNATYERLPLEDDDQEQHGGGGGGGSPQEKTGGPGEASSSISVYNNNVPPSLGLPNGQHLNHEAYSSPWGHSPHARPPF

SEQ ID NO: 387 - DNA, 1153 bp, Glycine max
  G3458 Functionally related and homologous to G1073
tcgcccacgcgtccgtacggctgcgagaagacgacagaaggggccactttatttgtctctctctttcccttccaacctcatcccattccgttttctctgcagtactcaattgatccctttgtttttctattcgttctgagagctttgtgtgtatggccggcatagacttgggttcagcatcacattttgttcatcatcgccttgaacgccctgaccttgaagacgatgagaaccaacaagaccaagacaacaaccttaacaatcacgaagggcttgacctagttacaccaaattcaggtcctggtgatgttgttggtcgcaggccaagaggaagacctccaggttcaaagaacaagccaaaaccaccagttatcatcacaagagagagtgcaaacacccttagggctcacatccttgaagttagtagtggttgtgacgtctttgaatcggtcgctacctatgcaaggaagcgacaaagagggatctgtgtcctcagtgggagtggcaccgtgaccaacgtgacattgaggcagccggccgcggctggtgccgtcgtcacgctgcacggaaggtttgagatcctctctttgtcaggatcattcctcccacctccagctccaccaggtgctacaagtttgactgtgttccttggtggaggacagggtcaagtggtgggaggaaatgttgttggtcctttggtggcttctgggcctgttattgttattgcttcatcttttactaatgtagcatatgagaggttgcctttggatgaagatgaatctatgcagatgcaacaagggcaatcatcagctggtgatggtagcggtgaccatggtggtggagttagtaataactcttttccggatccgtcttccgggcttccattcttcaatttgccactaaacatgcctcagttacctgttgatggttgggctggcaactctggtggaaggcaatcttactgatccagagtctttgggggcacaaaggtgagaagttgaattgatctcatatatattggtcttctctaatctttcctctgaatattgcttgtgaagaagtactgatttttctattgaagaaatcgtttgtttggctaggtttgttgtaaggacgatcagtttctaggaacaactgtaaaacgttttctctt

SEQ ID NO: 388 - protein, 270 aa, Glycine max
  G3458 polypeptide  Functionally related and homologous to G1073
MAGIDLGSASHFVHHRLERPDLEDDENQQDQDNNLNNHEGLDLVTPNSGPGDVVGRRPRGRPPGSKNKPKPPVIITRESANTLRAHILEVSSGCDVFESVATYARKRQRGICVLSGSGTVTNVTLRQPAAAGAVVTLHGRFEILSLSGSFLPPPAPPGATSLTVFLGGGQGQVVGGNVVGPLVASGPVIVIASSFTNVAYERLPLDEDESMQMQQGQSSAGDGSGDHGGGVSNNSFPDPSSGLPFFNLPLNMPQLPVDGWAGNSGGRQSY

SEQ ID NO: 389 - DNA, 1596 bp, Glycine max
  G3459 Functionally related and homologous to G1073
ctgtcgcgtgggaaacaaatggctgcattgtgagttctttgtccccttcaacctcatttcaattctctctctcccccattcttacttcacccgcgccccctcccccgcccgctcccgtcccttttctttctctgcactccatctttctttccaaaacccacccttttctattcctcttcctcttcctccttttcccttctttttatttccttacactcacaacatttcccttaaaataaacataaacaaaccagcactgttcttgacccccaaaaaaaaaaaatctctactatttattaactatattaattcctccataatataatcatttgttttccttgttttctgttttctcttataatatataaccttcttttatctattttttctgttttgcaccttgtgattgtgagttatatctatttatatttatatatcattctctctcttttttttggatgtgtctatggctggtttggatttaggaagcgcctcacgctttgttcaaaaccttcacagaccagacttgcacttgcaacaaaatttccagcagcaccaggaccagcagcaccagcgtgatttggaggagcagaaaactcctccgaatcacagaatgggggcgccgttcgacgatgatagcgatgatagaagcccgggcctggagctcacttcaggtcctggcgacatcgtcggacggcgcccgcgtggcaggcctcctgggtcgaagaacaagcctaagccgcccgtcataatcacccgggagagcgccaacacgctgagggcgcacatcctcgaggtcggaagcggctccgacgtcttcgactgtgtcaccgcgtatgcccggcggcgccagcgtgggatctgcgtcctcagtggcagcggcaccgtcaccaatgtcagtctccggcagcctgcagctgccggtgccgtcgtcacgctgcacggcaggttcgagattctctccctctctggctcgttcctcccgccgccggctccgccgggagccaccagcctcacaatctacctggccggcgggcaggggcaggttgtcggaggaaacgtcatcggagaattaaccgcagcagggccagtaatcgtcatcgcagcgtcgttcaccaacgtggcttacgagaggttacccttagaagaagatgaacaacagcagcaacaacagcagcttcagattcagccacctgcaacgacgtcgtctcaaggaaacaacaacaacaataaccctttccccgacccttcttcaggacttcccttcttcaatttaccactcaatatgcagaatgttcagttaccagttgagggttgggctgtaaaccctgcttcacgtccacaacctttttgagagttcatgaagatgttgacggaggatttatatcacaaaaggctttatattattttaaggtcagcaaattaatattcatggactacaacatatatataaactatatgttttttcttcttcttcatgttattttgtttttttcttatgttgttaatggatataatatgacatgataattattatgtagtctgattttcatctccttggaattttatatacttatttcccctgttaaaaaaaaa

SEQ ID NO: 390 - protein, 295 aa, Glycine max
  G3459 polypeptide  Functionally related and homologous to G1073
MAGLDLGSASRFVQNLHRPDLHLQQNFQQHQDQQHQRDLEEQKTPPNHRMGAPFDDDSDDRSPGLELTSGPGDIVGRRPRGRPPGSKNKPKPPVIITRESANTLRAHILEVGSGSDVFDCVTAYARRRQRGICVLSGSGTVTNVSLRQPAAAGAVVTLHGRFEILSLSGSFLPPPAPPGATSLTIYLAGGQGQVVGGNVIGELTAAGPVIVIAASFTNVAYERLPLEEDEQQQQQQQLQIQPPATTSSQGNNNNNNPFPDPSSGLPFFNLPLNMQNVQLPVEGWAVNPASRPQPF

SEQ ID NO: 391 - DNA, 1443 bp, Glycine max
  G3460 PFunctionally related and homologous to G1073
tttccaaaacccacccttttctattcctcttcctgcttttcccttctttttatttccacacactcacaccacttcccttaaaataaacataaacaaaccaatactgttcttgacccaaaaaaaaaattatctactatttattaactatatttctccatattataatcatttgtattccttgttttctatgcttctcttataatatataaccttcgttttatttattttttttgttttgcaccttgtggattgtgagctatatctatttatatatatcattctctttctttttttttggatgtttctatggctggtttggatttaggaagcgcgtcacgctttgttcagaatcttcacttaccggacttgcacttgcaacaaaattaccagcaaccccggcacaagcgcgattcggaggagcaagagactcctccgaacccgggaacagcgctggcgccgttcgacaacgatgatgacaaaagccagggcttggagctggcttcaggccctggggacatcgttggacggcgcccacgcggcagaccttccgggtccaagaacaagccgaagccaccggtgataatcacccgggagagcgccaacacgctgagggcgcacattctcgaggtaggaagcggctccgacgtcttcgactgtgtcaccgcttatgcgcggcggcgccagcgcgggatctgcgtcctcagcggcagtggcaccgtcaccaatgtcagtctccggcagcctgcggctgccggagccgtcgtcaggctgcacggaaggttcgagattctctctctctccggctcgttcctcccgccgccggctccgccgggagccaccagtctcacaatctacctcgccggcgggcagggccaggtcgtcggaggaaacgtcgtgggagaattaaccgcggcagggccagtaatcgtcatcgcagcatcgttcaccaacgtggcttacgagaggctccccttagaagaagatgaacagcagcatcaacagcttcagattcagtcacccgcagcgacgtcatctcaaggaaacaacaacaataaccctttccctgacccttcttcaggacttcccttcttcaacttaccactcaatatgcagaatgttcagttaccacctttttgagggttcatgaatctgataatatgagactgatgaagatcatgttgatggaggatttatcaccaaagggtttatattattataaggtcagcaaatattcatggactagaacatatatataaactatatgttcttcttcttcttgttagtatgttttttttttcttctgttgttaatgggtatcgttatgataggacatgattattattattatgtagcgagtttcagtctgactctcatgtctttgggattttatttacttatttcccttgtccattattagaatatggaaccctgtattatttaatt

SEQ ID NO: 392 - protein, 276 aa, Glycine max
  G3460 polypeptide  Functionally related and homologous to G1073
MAGLDLGSASRFVQNLHLPDLHLQQNYQQPRHKRDSEEQETPPNPGTALAPFDNDDDKSQGLELASGPGDIVGRRPRGRPSGSKNKPKPPVIITRESANTLRAHILEVGSGSDVFDCVTAYARRRQRGICVLSGSGTVTNVSLRQPAAAGAVVRLHGRFEILSLSGSFLPPPAPPGATSLTIYLAGGQGQVVGGNVVGELTAAGPVIVIAASFTNVAYERLPLEEDEQQHQQLQIQSPAATSSQGNNNNNPFPDPSSGLPFFNLPLNMQNVQLPPF

SEQ ID NO: 393 - DNA, 1611 bp, Glycine max
  G3462 Predicted polypeptide sequence is orthologous to G1073
ccacgcgtccgcactctaaggtacttccccactgttcccattttatgcccgtactagtctgacccttttagtggcatagattgaggtacaattacaaaagcatattacccgtatcgtatcctttctgctacaaccaccccgaaacacactgcgttttttttgtgtcaaacttcaaccggggctttcttacttctcttctcttcaactttttagtgttttttttttttttttctcgtgtcgggtccttgagcttctatttgtttatttatttccggcagcgagttgagttaattttcgtgtcatagtctcaattaggtggatgtgacttgtgtggttagggtttacatgcaaaaacgcatgtgcttcgggtctaattcatcctgaaacaaggttttgggacagagatctgaatatttcaagctatctattttgtttctctatctagaaggttttgagaaatcaaagatggcgaatagatggtgggctgggaatgtgggaatgataagagagcaagagttgatggaaaacagcaacaacaacaacaacaacaacaacgctactactactacaccgacgacgaggagcaacagcaacactaacgcgaacaccaacaccaacacgaccgaggaagaggtgagcagggataacggagaggaccagaaccaaaacctcggcagccacgaagggtcggagcccggaagcagcggtcggaggccacgtggcaggccagcggggtccaagaacaagcccaagccgcccatagtcataatttttttaagccccaacgcgctccgaagccacgtcctggaaatcgcctccggccgcgatgtcgccgagagcatcgccgccttcgccaaccgccgccaccgtggcgtgtcggtcctcagcgggagtggcattgtagccaacgtcactctccgccagcccgccgcccccgccggcgtcataaccctccacgggaggttcgagatactctccctctcgggtgcctttttgccgtccccctcgccgtccggcgccaccggactgaccgtctacctagccggcgggcaggggcaggttgtcggcggcaacgtggcgggctctctcgtcgcctccggaccggtgatggtgatcgccgccactttcgctaatgccacttatgagaggttgcctctggaggatgatcaaggtgaggaggaaatgcaagtgcagcagcagcagcagcagcagcaacagcagcagcagcagcagcagcaacaacaatctcaaggtttgggggaacaggtttcaatgcctatgtataatttgcctcctaatttgctacacaatggtcagaacatgcctcatgatgtgttctggggagctccacctcgccctcctccttccttctgatcacccttgccaatatgatcatgtctttaatctctcactgacttgcgaattaagtactatgttaattaatttctcacggtttttcttgcaagcatagctagctagctagcaaggttagttattaggatggttttgttaatttgtgcttcttagagactcgagtcaagtagatgatgttcttatctttaatatactttgtagtactactggtttgtttattgttttttttaaaaaaaa

SEQ ID NO: 394 - protein, 302 aa, Glycine max
  G3462 polypeptide  Orthologous to G1073
MANRWWAGNVGMIREQELMENSNNNNNNNNATTTTPTTRSNSNTNANTNTNTTEEEVSRDNGEDQNQNLGSHEGSEPGSSGRRPRGRPAGSKNKPKPPIVIIFLSPNALRSHVLEIASGRDVAESIAAFANRRHRGVSVLSGSGIVANVTLRQPAAPAGVITLHGRFEILSLSGAFLPSPSPSGATGLTVYLAGGQGQVVGGNVAGSLVASGPVMVIAATFANATYERLPLEDDQGEEEMQVQQQQQQQQQQQQQQQQQQSQGLGEQVSMPMYNLPPNLLHNGQNMPHDVFWGAPPRPPPSF

SEQ ID NO: 395 - DNA, 555 bp, Glycine max
  G3470 Predicted polypeptide sequence is orthologous to G481 and G482
tcaccgggtttgtgagatgtcggatgcaccggcgagtccgagtcacgagagtggtggcgagcagagccctcgcggctcgttgtccggcgcggctagagagcaggaccggtaccttcccattgccaacatcagccgcatcatgaagaaggctctgcctcccaatggcaagattgcgaaggatgcaaaagacacaatgcaagaatgcgtttctgaattcatcagcttcattaccagcgaggcgagtgagaaatgccagaaggagaagagaaagacaatcaatggagacgatttactatgggccatggcaactttagggtttgaagactacattgagccgcttaaggtgtacctggctaggtacagagaggcggagggtgacactaaaggatctgctagaagtggtgatggatctgctagaccagatcaagttggccttgcaggtcaaaatgctcagcttgttcatcagggttcgctgaactatattggtttgcaggtgcaaccacaacatctggttatgccttcaatgcaaggccatgaatagtttagatgcttcta

SEQ ID NO: 396 - protein, 174 aa, Glycine max
  G3470 polypeptide  Orthologous to G481 and G482
MSDAPASPSHESGGEQSPRGSLSGAAREQDRYLPIANISRIMKKALPPNGKIAKDAKDTMQECVSEFISFITSEASEKCQKEKRKTINGDDLLWAMATLGFEDYIEPLKVYLARYREAEGDTKGSARSGDGSARPDQVGLAGQNAQLVHQGSLNYIGLQVQPQHLVMPSMQGHE

SEQ ID NO: 397 - DNA, 556 bp, Glycine max
  G3471 Predicted polypeptide sequence is orthologous to G481 and G482
gtagggtttgtgagatgtcggatgcgccaccgagcccgactcatgagagtgggggcgagcagagcccgcgcggttcgtcgtccggcgcgagggagcaggaccggtacctcccgattgccaacatcagccgcattatgaagaaggctctgcctcccaacggcaagattgcaaaggatgccaaagacaccatgcaggaatgcgtttctgagttcatcagcttcattaccagcgaggcgagtgagaaatgccagaaggagaagagaaagacaatcaatggagacgatttgctatgggccatggccactttaggatttgaagactacatagagccgcttaaggtgtacctggctaggtacagagaggcggagggtgacactaaaggatctgctagaagtggtgatggatctgctacaccagatcaagttggccttgcaggtcaaaattctcagcttgttcatcagggttcgctgaactatattggtttgcaggtgcaaccacaacatctggttatgccttcaatgcaaagccatgaatagtttagatgcttctacgcatc

SEQ ID NO: 398 - protein, 173 aa, Glycine max
  G3471 polypeptide  Orthologous to G481 and G482
MSDAPPSPTHESGGEQSPRGSSSGAREQDRYLPIANISRIMKKALPPNGKIAKDAKDTMQECVSEFISFITSEASEKCQKEKRKTINGDDLLWAMATLGFEDYIEPLKVYLARYREAEGDTKGSARSGDGSATPDQVGLAGQNSQLVHQGSLNYIGLQVQPQHLVMPSMQSHE

SEQ ID NO: 399 - DNA, 547 bp, Glycine max
  G3472  Predicted polypeptide sequence is orthologous to G481 and G482
taaggctagctagctagccatggctgagtcggacaacgagtccggaggtcacacggggaacgcaagcggaagcaacgaattctccggttgcagggagcaagacaggttccttccgatagcgaacgtgagcaggatcatgaagaaggcgttgccggcgaacgcgaagatctcgaaggaggcgaaggagacggtgcaggagtgcgtgtcggagttcatcagcttcataacaggagaagcgtccgataagtgccagaaggagaagaggaagacgatcaacggcgatgatctgctgtgggccatgaccacgctgggattcgaggagtacgtggagcctctcaaggtttatctgcataagtatagggagctggaaggggagaaaactgctatgatgggaaggccacatgagagggatgagggttatggtcatgcaactcctatgatgatcatgatggggcatcaacagcagcagcatcagggacacgtgtatggatctggaactactactggatcagcatcttctgcaagaactagataacaggtttatgca

SEQ ID NO: 400 - protein, 171 aa, Glycine max
  G3472 polypeptide  Orthologous to G481 and G482
MAESDNESGGHTGNASGSNEFSGCREQDRFLPIANVSRIMKKALPANAKISKEAKETVQECVSEFISFITGEASDKCQKEKRKTINGDDLLWAMTTLGFEEYVEPLKVYLHKYRELEGEKTAMMGRPHERDEGYGHATPMMIMMGHQQQQHQGHVYGSGTTTGSASSARTR

SEQ ID NO: 401 - DNA, 1818 bp, Glycine max
  G3473 Predicted polypeptide sequence is orthologous to G481 and G482
tttttaaataataaaatgtttctttggaaatttcttaaaaagtatgaacataaatttaaattattattttatattaaatgcacttatgttaatttatttgtcttgcatacacatttaatgttatccttctttatatctatattaaactatatatataaagaaaagattttgaaatttgaataagataagagtgtccaggtcagaggcgagcacgtgccagataccaaagcaacggtccagatcatggagcactcaccaaatccaagggctccaattcgtccgtggacactcacacttatcgactaacaacggtccacaaatcgccacgtgtcctcaagataaagcgttattaacccttctgatccaacggatcctgctcattatctcccaaacaaacccctccgttccgtttcacctttccccttcccgccggagccgccgtcaccggtcgctggccaccgtatccgaccctcccaatacaccctttccgagtcccacacaaaattgcacgattctgtgatttcaattttcaggtctcgaggatttcgtttcagaagcgcttccatttgacgcagaaccaccgactcaaaccgattcgcgccgagttcgtgactcgaattttcaacttctcattcatattccaaatcgaatttgaaactccgaagaaaaattcaccgaacactgaatctcagtttccaaggagcttcttctacgaagagcgcttcaattccacgcagaaccaccaagtcaagccggttcgtgactcggattctcaattcctcgttcattcccgaacgaattttaaattccgaagaaaaccgcaccgaacactgaatttcagattctgaacaagtttcttccgcgaaacagcacagcacttcaatttcacgtggaacagagacaaagggattcgtggttcgaattctcaatcgattttcaaattccgaacagcgaacagtacttcaatttcacgtcgaactagtcaaagcgattcaaatcgatttcgcgaactcgtccgatattttccctgcactgacttagtgattcgtttcatctttctcagcgcgtcttcgatttttccgttagtcgatggcggactccgacaacgactccggcggcgcgcacaacggcggcaaggggagcgagatgtcgccgcgggagcaggaccggtttctcccgatcgcgaacgtgagccgcatcatgaagaaggcgctgccggcgaacgcgaagatctcgaaggacgcgaaggagacggtgcaggagtgcgtgtcggagttcatcagcttccattcaccggggggcctcgccggtgagtgccagaaggagaagaggaagacgatcaacggcgatgatctgctgtgggccatgaccacgctgggattcgaggagtacgtggagcctctcaaggtttatctgcataagtatagggagctggaaggggagaaaactgctatgatgggaaggccacatgagagggatgagggttatggtcatgcaactcctatgatgatcatgatggggcatcagcagcagcagcatcagggacacgtgtatggatctggaactactactggatcagcatcttctgcaagaactagataacaggtttatgcatgtgttatctcatctgtttaagcttattaagggtggtctttttggatggtgattttgtttgattttagaaacaccccagctccagcttgtaattgttgcttgaaacttcgttgttgagagaatatagccattattgtggatggtgatgtgacatgcacagaatttttgtattcttctttcttccaatggatttatctcgggccc

SEQ ID NO: 402 - protein, 170 aa, Glycine max
  G3473 polypeptide  Orthologous to G481 and G482
MADSDNDSGGAHNGGKGSEMSPREQDRFLPIANVSRIMKKALPANAKISKDAKETVQECVSEFISFHSPGGLAGECQKEKRKTINGDDLLWAMTTLGFEEYVEPLKVYLHKYRELEGEKTAMMGRPHERDEGYGHATPMMIMMGHQQQQHQGHVYGSGTTTGSASSARTR

SEQ ID NO: 403 - DNA, 553 bp, Glycine max
  G3474 Predicted polypeptide sequence is orthologous to G481 and G482
gatatccatggctgagtccgacaacgagtcaggaggtcacacggggaacgcgagcgggagcaacgagttgtccggttgcagggagcaagacaggttcctcccaatagcaaacgtgagcaggatcatgaagaaggcgttgccggcgaacgcgaagatatcgaaggaggcgaaggagacggtgcaggagtgcgtgtcggagttcatcagcttcataacaggagaggcttccgataagtgccagaaggagaagaggaagacgatcaacggcgacgatcttctctgggccatgactaccctgggcttcgaggactacgtggatcctctcaagatttacctgcacaagtatagggagatggagggggagaaaaccgctatgatgggaaggccacatgagagggatgagggttatggccatggccatggtcatgcaactcctatgatgacgatgatgatggggcatcagccccagcaccagcaccagcaccagcaccagggacacgtgtatggatctggatcagcatcttctgcaagaactagatagcatgtgtcatct

SEQ ID NO: 404 - protein, 177 aa, Glycine max
  G3474 polypeptide  Orthologous to G481 and G482
MAESDNESGGHTGNASGSNELSGCREQDRFLPIANVSRIMKKALPANAKISKEAKETVQECVSEFISFITGEASDKCQKEKRKTINGDDLLWAMTTLGFEDYVDPLKIYLHKYREMEGEKTAMMGRPHERDEGYGHGHGHATPMMTMMMGHQPQHQHQHQHQGHVYGSGSASSARTR

SEQ ID NO: 405 - DNA, 600 bp, Glycine max
  G3475 Predicted polypeptide sequence is orthologous to G481 and G482
tcgattatccgtttgtcgatggcggactcggacaacgactccggcggcgcgcacaacgccgggaaggggagcgagatgtcgccgcgggagcaggaccggttcctgccgatcgcgaacgtgagccgcatcatgaagaaggcgctgccggcgaacgcgaagatctcgaaggacgcgaaggagacggtgcaggagtgcgtgtcggagttcatcagcttcatcaccggcgaggcctccgacaagtgccagcgggagaagcgcaagacgatcaacggcgacgacctgctctgggcgatgaccactctcggcttcgaggactacgtcgagcctctcaagggctacctccagcgcttccgagaaatggaaggagagaagacagtggcggcgcgtgacaaggacgcgcctcctcctaccaatgctaccaacagtgcctacgagagtcctagttatgctgctgctcctggtggaatcatgatgcatcagggacacgtgtacggttctgccggcttccatcaagtggctggtggtgctataaagggtgggcctgtttatcccgggcctggatccaatgccggtaggcccaggtagatgggcctatgttat

SEQ ID NO: 406 - protein, 188 aa, Glycine max
  G3475 polypeptide  Orthologous to G481 and G482
MADSDNDSGGAHNAGKGSEMSPREQDRFLPIANVSRIMKKALPANAKISKDAKETVQECVSEFISFITGEASDKCQREKRKTINGDDLLWAMTTLGFEDYVEPLKGYLQRFREMEGEKTVAARDKDAPPPTNATNSAYESPSYAAAPGGIMMHQGHVYGSAGFHQVAGGAIKGGPVYPGPGSNAGRPR

SEQ ID NO: 407 - DNA, 528 bp, Glycine max
  G3476 Predicted polypeptide sequence is orthologous to G481 and G482
ggattgattgtgaagatggctgagtcggacaacgactcgggaggggcgcagaacgcgggaaacagtggaaacttgagcgagttgtcgcctcgggaacaggaccggtttctccccatagcgaacgtgagcaggatcatgaagaaggccttgccggcgaacgcgaagatctcgaaggacgcgaaggagacggtgcaggaatgcgtgtcggagttcatcagcttcataacgggtgaggcgtcggacaagtgccagagggagaagcgcaagaccatcaacggcgacgatcttctctgggccatgacaaccctgggattcgaagagtacgtggagcctctgaagatttacctccagcgcttccgcgagatggagggagagaagaccgtggccgcccgcgactcttctaaggactcggcctccgcctcctcctatcatcagggacacgtgtacggctcccctgcctaccatcatcaagtgcctgggcccacttatcctgcccctggtagacccagatgacgtgctcctctattc

SEQ ID NO: 408 - protein, 165 aa, Glycine max
  G3476 polypeptide  Orthologous to G481 and G482
MAESDNDSGGAQNAGNSGNLSELSPREQDRFLPIANVSRIMKKALPANAKISKDAKETVQECVSEFISFITGEASDKCQREKRKTINGDDLLWAMTTLGFEEYVEPLKIYLQRFREMEGEKTVAARDSSKDSASASSYHQGHVYGSPAYHHQVPGPTYPAPGRPR

SEQ ID NO: 409 - DNA, 568 bp, Glycine max
  G3477 Predicted polypeptide sequence is orthologous to G481 and G482
tcgacttgtagggtttgtgagatgtcggatgcaccggcgagtccgagtcacgagagtggtggcgagcagagccctcgcggctcgttgtccggcgcggctagagagcaggaccggtaccttcccattgccaacatcagccgcatcatgaagaaggctctgcctcccaatggcaagattgcgaaggatgcaaaagacacaatgcaagaatgcgtttctgaattcatcagcttcattaccagcgaggcgagtgagaaatgccagaaggagaagagaaagacaatcaatggagacgatttactatgggccatggcaactttagggtttgaagactacattgagccgcttaaggtgtacctggctaggtacagagaggcggagggtgacactaaaggatctgctagaagtggtgatggatctgctagaccagatcaagttggccttgcaggtcaaaatgctcagcttgttcatcagggttcgctgaactatattggtttgcaggtgcaaccacaacatctggttatgccttcaatgcaaggccatgaatagtttagatgcttctacgcatcgc

SEQ ID NO: 410 - protein, 174 aa, Glycine max; identical to SEQ ID NO: 396
  G3477 polypeptide  Orthologous to G481 and G482

SEQ ID NO: 411 - DNA, 602 bp, Glycine max
  G3478 Predicted polypeptide sequence is orthologous to G481 and G482
ttccgttagtcgatggcggactccgacaacgactccggcggcgcgcacaacggcggcaaggggagcgagatgtcgccgcgggagcaggaccggtttctcccgatcgcgaacgtgagccgcatcatgaagaaggcgctgccggcgaacgcgaagatctcgaaggacgcgaaggagacggtgcaggagtgcgtgtcagagttcatcagcttcatcaccggcgaggcctccgacaagtgccagcgcgagaagcgcaagacgatcaacggcgacgacctgctctgggcgatgaccactctgggcttcgaggactacgtggagcctctcaaaggctacctccagcgcttccgagaaatggaaggagagaagaccgtggcggcgcgtgacaaggacgcgcctcctcttacgaatgctaccaacagtgcctacgagagtgctaattatgctgctgctgctgctgttcctggtggaatcatgatgcatcagggacacgtgtacggttctgccggcttccatcaagtggctggcggggctataaagggtgggcctgcttatcctgggcctggatccaatgccggtaggcccagataaagagcctattatta

SEQ ID NO: 412 - protein, 191 aa, Glycine max
  G3478 polypeptide  Orthologous to G481 and G482
MADSDNDSGGAHNGGKGSEMSPREQDRFLPIANVSRIMKKALPANAKISKDAKETVQECVSEFISFITGEASDKCQREKRKTINGDDLLWAMTTLGFEDYVEPLKGYLQRFREMEGEKTVAARDKDAPPLTNATNSAYESANYAAAAAVPGGIMMHQGHVYGSAGFHQVAGGAIKGGPAYPGPGSNAGRPR

SEQ ID NO: 413 - DNA, 803 bp, Oryza sativa (japonica cultivar-group)
  G3556 Predicted polypeptide sequence is orthologous to G1073
tcgacgggatggggagcatcgacggccactcgctgcagcagcatcaggggtactcccacggcggcggcgcgggagggagcaacgaggaggaggaggcgtcgccgccgcccggcggtggctcggctacggggtcggcgggccgccggccgagggggaggccgccgggctccaagaacaagccgaagccgcccgtcgtggtgacgcgggagagccccaacgcgatgcgttcccacgtgctggagatcgccagcggcgccgacatcgtcgaggccatcgcgggcttctcccgccgcaggcagcgcggcgtctccgtgctcagcgggagcggcgccgtcaccaacgtcacgctccggcagcccgcggggactggggccgccgccgtcgcgctgcgggggaggttcgagatattgtccatgtctggcgccttcctcccggcgccggcgccgccaggggccacggggctcgccgtgtacctcgccggcgggcaggggcaggtggtgggtgggagcgtcatgggggagctgatcgcgtcgggccccgtcatggtgatcgcggccacgttcggcaacgccacgtacgagaggctgccgctggaccaggaaggcgaggagggcgccgtgctgtccgggtcggagggcgccgccgcgcagatggagcagcagagcagcggaggcgccgtcgtgcccccgccgatgtacgccgccgtccagcagacgccgccgcacgacatgttcgggcagtgggggcatgcagcggtggctcggccgccgccgacatcgttctagcactggcaccggttaatt

SEQ ID NO: 414 - protein, 258 aa, Oryza sativa (japonica cultivar-group)
  G3556 polypeptide  Orthologous to G1073
MGSIDGHSLQQHQGYSHGGGAGGSNEEEEASPPPGGGSATGSAGRRPRGRPPGSKNKPKPPVVVTRESPNAMRSHVLEIASGADIVEAIAGFSRRRQRGVSVLSGSGAVTNVTLRQPAGTGAAAVALRGRFEILSMSGAFLPAPAPPGATGLAVYLAGGQGQVVGGSVMGELIASGPVMVIAATFGNATYERLPLDQEGEEGAVLSGSEGAAAQMEQQSSGGAVVPPPMYAAVQQTPPHDMFGQWGHAAVARPPPTSF

SEQ ID NO: 415 - DNA, 435 bp, Oryza sativa (japonica cultivar-group)
  G3835 Predicted polypeptide sequence is orthologous to G481 and G482
atgacgaacgggcaggacaacctgctgccgatcgccaacgtgggccggatcatgaaggacgggctgccgccgcaggcgaagatatcgaagcgggccaaggagacgatccaggagtgcgcgacggagttcatcagcttcgtcaccggcgaggcgtcggagcggtgccggcgggagcggcggaagacggtgaacggcgacgacgtctgccacgccatgaggagcctcggcctcgaccactacgccgacgccatgcacaggtacctgcagaggtaccgcgagggcgaggagctcgccgcgtcgctcaacagcagcagcagcgccgccgccgccgccgccgccgccggcagcaggggcggtggcgccatacagatcgacgtgagagctgagctctccatcttcagatcaggcaacaaccaaggtcgtccaaacaattaa

SEQ ID NO: 416 - protein, 144 aa, Oryza sativa (japonica cultivar-group)
  G3835 polypeptide  Orthologous to G481 and G482
MTNGQDNLLPIANVGRIMKDGLPPQAKISKRAKETIQECATEFISFVTGEASERCRRERRKTVNGDDVCHAMRSLGLDHYADAMHRYLQRYREGEELAASLNSSSSAAAAAAAAGSRGGGAIQIDVRAELSIFRSGNNQGRPNN

SEQ ID NO: 417 - DNA, 534 bp, Oryza sativa (japonica cultivar-group)
  G3836 Predicted polypeptide sequence is orthologous to G481 and G482
atggccgaccaccatggcggccaccacgccgacgggcatcgccggcagcagcagctgcagggggaggcggcggatcaggcggcggcggagatcatcaaggagcaggacaggttgctgccaatcgcgaacgtggggcgaatcatgaagcagatcctcccccccaacgccaagatctccaaggaggccaaggagacgatgcaggagtgcgtctcggagttcatcagcttcgtcaccggcgaggcctccgacaagtgccacaaggagaagcgcaagacggtcaacggcgacgacgtctgctgggccttcggcgccctcggcttcgacgactacgtcgaccccatgcgcaggtacctcaacaagtaccgcgagctcgagggcgaccgcgccgccgccgccgccacctcccgctccggcgccggcgccgccgcgggccccgaccacccttcctcctcctcctccgccgccgccgccaccgccggtcatttcatgttcaacgccatggacaggtcgacggatagctccaggcagttctag

SEQ ID NO: 418 - protein, 177 aa, Oryza sativa (japonica cultivar-group)
  G3836 polypeptide  Orthologous to G481 and G482
MADHHGGHHADGHRRQQQLQGEAADQAAAEIIKEQDRLLPIANVGRIMKQILPPNAKISKEAKETMQECVSEFISFVTGEASDKCHKEKRKTVNGDDVCWAFGALGFDDYVDPMRRYLNKYRELEGDRAAAAATSRSGAGAAAGPDHPSSSSSAAAATAGHFMFNAMDRSTDSSRQF

SEQ ID NO: 419 - DNA, 795 bp, Glycine max
  G3837 Predicted polypeptide sequence is orthologous to G481 and G482
ctgtgtttgagaggactaaagtaaacagatgggtgacaacaacataggcaaagtcttagagagagaaggctttaagtacaacttcacggcagctgcaagtgacacctctgcacaagatgaggtgattaaagagcaagatcggttgcttccaatagcaaatgtggggcgcatcatgaagcaaatccttcctcctaacgccaagatctcaaaggaagctaaagaaaccatgcaagaatgtgtgtccgagttcattagctttgtcactggggaagcttctgacaagtgtcacaaggagaagcgcaagaccgtgaatggcgacgatatttgctgggcccttgctaccctagggtttgatgactactctgagccacttaaaaggtacttgcataagtatagggagttcgaaggggagagagcaaatcaaaataagggtaacaacaacacttatgaaaacaacattgcaaacatataaattaattatgtggaaggtgaactctttctccaattcccatgatcaatgtgattgatagttgttaatctgatcttctagttttctcctgaatttgagatactcaaggggcttgtatccttatgtgatatatatatgacgtgagtcatgtatgcaaactcacgtgttttagacctgatattttcatcaagggttgaaattaccctagatgaacacatggtagcttgagaatcatgtgagttacaactaatctttgtatttgtctatccaataataagcttggatcctttccagaaaaaaaaaaaaaaaaaaaaaaaaaaaaaaaa

SEQ ID NO: 420 - protein, 147 aa, Glycine max
  G3837 polypeptide  Orthologous to G481 and G482
MGDNNIGKVLEREGFKYNFTAAASDTSAQDEVIKEQDRLLPIANVGRIMKQILPPNAKISKEAKETMQECVSEFISFVTGEASDKCHKEKRKTVNGDDICWALATLGFDDYSEPLKRYLHKYREFEGERANQNKGNNNTYENNIANI

SEQ ID NO: 421 - DNA, 929 bp, Arabidopsis thaliana
  CBF1
cttgaaaaagaatctacctgaaaagaaaaaaaagagagagagatataaatagctttaccaagacagatatactatcttttattaatccaaaaagactgagaactctagtaactacgtactacttaaaccttatccagtttcttgaaacagagtactctgatcaatgaactcattttcagctttttctgaaatgtttggctccgattacgagcctcaaggcggagattattgtccgacgttggccacgagttgtccgaagaaaccggcgggccgtaagaagtttcgtgagactcgtcacccaatttacagaggagttcgtcaaagaaactccggtaagtgggtttctgaagtgagagagccaaacaagaaaaccaggatttggctcgggactttccaaaccgctgagatggcagctcgtgctcacgacgtcgctgcattagccctccgtggccgatcagcatgtctcaacttcgctgactcggcttggcggctacgaatcccggagtcaacatgcgccaaggatatccaaaaagcggctgctgaagcggcgttggcttttcaagatgagacgtgtgatacgacgaccacgaatcatggcctggacatggaggagacgatggtggaagctatttatacaccggaacagagcgaaggtgcgttttatatggatgaggagacaatgtttgggatgccgactttgttggataatatggctgaaggcatgcttttaccgccgccgtctgttcaatggaatcataattatgacggcgaaggagatggtgacgtgtcgctttggagttactaatattcgatagtcgtttccatttttgtactatagtttgaaaatattctagttcctttttttagaatggttccttcattttattttattttattgttgtagaaacgagtggaaaataattcaatac

SEQ ID NO: 422 - protein, 213 aa, Arabidopsis thaliana
  CBF1 polypeptide
MNSFSAFSEMFGSDYEPQGGDYCPTLATSCPKKPAGRKKFRETRHPIYRGVRQRNSGKWVSEVREPNKKTRIWLGTFQTAEMAARAHDVAALALRGRSACLNFADSAWRLRIPESTCAKDIQKAAAEAALAFQDETCDTTTTNHGLDMEETMVEAIYTPEQSEGAFYMDEETMFGMPTLLDNMAEGMLLPPPSVQWNHNYDGEGDGDVSLWSY

SEQ ID NO: 423 - DNA, 803 bp, Arabidopsis thaliana
  CBF2
ctgatcaatgaactcattttctgccttttctgaaatgtttggctccgattacgagtctccggtttcctcaggcggtgattacagtccgaagcttgccacgagctgccccaagaaaccagcgggaaggaagaagtttcgtgagactcgtcacccaatttacagaggagttcgtcaaagaaactccggtaagtgggtgtgtgagttgagagagccaaacaagaaaacgaggatttggctcgggactttccaaaccgctgagatggcagctcgtgctcacgacgtcgccgccatagctctccgtggcagatctgcctgtctcaatttcgctgactcggcttggcggctacgaatcccggaatcaacctgtgccaaggaaatccaaaaggcggcggctgaagccgcgttgaattttcaagatgagatgtgtcatatgacgacggatgctcatggtcttgacatggaggagaccttggtggaggctatttatacgccggaacagagccaagatgcgttttatatggatgaagaggcgatgttggggatgtctagtttgttggataacatggccgaagggatgcttttaccgtcgccgtcggttcaatggaactataattttgatgtcgagggagatgatgacgtgtccttatggagctattaaaattcgatttttatttccatttttggtattatagctttttatacatttgatccttttttagaatggatcttcttctttttttggttgtgagaaacgaatgtaaatggtaaaagttgttgtcaaatgcaaatgtttttgagtgcag

SEQ ID NO: 424 - protein, 207 aa, Arabidopsis thaliana
  CBF2 polypeptide
MFGSDYESPVSSGGDYSPKLATSCPKKPAGRKKFRETRHPIYRGVRQRNSGKWVCELREPNKKTRIWLGTFQTAEMAARAHDVAAIALRGRSACLNFADSAWRLRIPESTCAKEIQKAAAEAALNFQDEMCHMTTDAHGLDMEETLVEAIYTPEQSQDAFYMDEEAMLGMSSLLDNMAEGMLLPSPSVQWNYNFDVEGDDDVSLWSY

SEQ ID NO: 425 - DNA, 908 bp, Arabidopsis thaliana
  misc_feature (851)..(851): n is a, c, g, or t
  CBF3
cctgaactagaacagaaagagagagaaactattatttcagcaaaccataccaacaaaaaagacagagatcttttagttaccttatccagtttcttgaaacagagtactcttctgatcaatgaactcattttctgctttttctgaaatgtttggctccgattacgagtcttcggtttcctcaggcggtgattatattccgacgcttgcgagcagctgccccaagaaaccggcgggtcgtaagaagtttcgtgagactcgtcacccaatatacagaggagttcgtcggagaaactccggtaagtgggtttgtgaggttagagaaccaaacaagaaaacaaggatttggctcggaacatttcaaaccgctgagatggcagctcgagctcacgacgttgccgctttagcccttcgtggccgatcagcctgtctcaatttcgctgactcggcttggagactccgaatcccggaatcaacttgcgctaaggacatccaaaaggcggcggctgaagctgcgttggcgtttcaggatgagatgtgtgatgcgacgacggatcatggcttcgacatggaggagacgttggtggaggctatttacacggcggaacagagcgaaaatgcgttttatatgcacgatgaggcgatgtttgagatgccgagtttgttggctaatatggcagaagggatgcttttgccgcttccgtccgtacagtggaatcataatcatgaagtcgacggcgatgatgacgacgtatcgttatggagttattaaaactcagattattatttccatttttagtacgatactttttattttattattatttttagatccttttttagaatggaatctncattatgtttgtaaaactgagaaacgagtgtaaattaaattgattcagtttcagtat

SEQ ID NO: 426 - protein, 216 aa, Arabidopsis thaliana
  CBF3 polypeptide
MNSFSAFSEMFGSDYESSVSSGGDYIPTLASSCPKKPAGRKKFRETRHPIYRGVRRRNSGKWVCEVREPNKKTRIWLGTFQTAEMAARAHDVAALALRGRSACLNFADSAWRLRIPESTCAKDIQKAAAEAALAFQDEMCDATTDHGFDMEETLVEAIYTAEQSENAFYMHDEAMFEMPSLLANMAEGMLLPLPSVQWNHNHEVDGDDDDVSLWSY

SEQ ID NO: 427 - DNA, 632 bp, Brassica napus
  bnCBF1
cacccgatataccggggagttcgtctgagaaagtcaggtaagtgggtgtgtgaagtgagggaaccaaacaagaaatctagaatttggcttggaactttcaaaacagctgagatggcagctcgtgctcacgacgtcgctgccctagccctccgtggaagaggcgcctgcctcaattatgcggactcggcttggcggctccgcatcccggagacaacctgccacaaggatatccagaaggctgctgctgaagccgcattggcttttgaggctgagaaaagtgatgtgacgatgcaaaatggccagaacatggaggagacgacggcggtggcttctcaggctgaagtgaatgacacgacgacagaacatggcatgaacatggaggaggcaacggcagtggcttctcaggctgaggtgaatgacacgacgacggatcatggcgtagacatggaggagacaatggtggaggctgtttttactggggaacaaagtgaagggtttaacatggcgaaggagtcgacggtggaggctgctgttgttacggaggaaccgagcaaaggatcttacatggacgaggagtggatgctcgagatgccgaccttgttggctgatatggcagaagggatgctcctgcc

SEQ ID NO: 428 - protein, 208 aa, Brassica napus
  bnCBF1 polypeptide
HPIYRGVRLRKSGKWVCEVREPNKKSRIWLGTFKTAEMAARAHDVAALALRGRGACLNYADSAWRLRIPETTCHKDIQKAAAEAALAFEAEKSDVTMQNGQNMEETTAVASQAEVNDTTTEHGMNMEEATAVASQAEVNDTTTDHGVDMEETMVEAVFTGEQSEGFNMAKESTVEAAVVTEEPSKGSYMDEEWMLEMPTLLADMAEGM

SEQ ID NO: 429 - DNA, 20 bp, artificial sequence
  Artificial Sequence
  misc_feature (6)..(6): n is a, c, g, or t
  misc_feature (15)..(15): n is a, c, g, or t
  misc_feature (18)..(18): n is a, c, g, or t
  Mol 368 reverse primer
cayccnathtaymgnggngt

SEQ ID NO: 430 - DNA, 21 bp, artificial sequence
  Artificial Sequence
  misc_feature (3)..(3): n is a, c, g, or t
  misc_feature (6)..(6): n is a, c, g, or t
  misc_feature (12)..(12): n is a, c, g, or t
  misc_feature (18)..(18): n is a, c, g, or t
  Mol 378 forward primer
ggnarnarcatnccytcngcc

What is claimed is:

1. A recombinant polynucleotide comprising a nucleotide sequence that hybridizes to SEQ ID NO: 11 or the complement of SEQ ID NO: 11 under stringent conditions that include two wash steps of 6×SSC and 65° C. for 10-30 minutes per step.

2. The recombinant polynucleotide of claim 1, wherein the recombinant polynucleotide is operably linked to at least one regulatory element being effective in controlling expression of the recombinant polynucleotide when the recombinant polynucleotide is transformed into a plant.

3. The recombinant polynucleotide of claim 1, wherein the recombinant polynucleotide is incorporated into an expression vector.

4. The recombinant polynucleotide of claim 3, wherein the recombinant polynucleotide is incorporated into a cultured host cell.

5. The recombinant polynucleotide of claim 1, wherein the recombinant polynucleotide encodes a polypeptide comprising the AP2 domain of SEQ ID NO: 12.

6. The recombinant polynucleotide of claim 1, wherein the recombinant polynucleotide encodes a polypeptide comprising SEQ ID NO: 12.

7. The recombinant polynucleotide of claim 1, wherein said recombinant polynucleotide comprises SEQ ID NO: 11.

8. A transgenic plant comprising the recombinant polynucleotide of claim 1.

9. Seed produced from the transgenic plant claim 8.

10. A recombinant polynucleotide comprising a nucleotide sequence that hybridizes to the nucleotide bases 53 to 256 of SEQ ID NO: 11 or the complement of nucleotide bases 53 to 256 of SEQ ID NO: 11 under stringent conditions that include two wash steps of 6×SSC and 65° C. for 10-30 minutes per step.

11. A transgenic plant comprising the recombinant polynucleotide of claim 10.

12. Seed produced from the transgenic plant claim 11.

13. A transgenic plant comprising a recombinant polynucleotide encoding a polypeptide;
wherein the polypeptide has the property of regulating abiotic stress tolerance in a plant when the polypeptide is overexpressed wherein the recombinant polynucleotide a nucleotide sequence selected from the group consisting of:
(a) SEQ ID NO: 2N-1, where N=1-210;
(b) a nucleic acid sequence that hybridizes to the nucleotide sequence or the complement of the nucleotide sequence of (a) under stringent conditions that include two wash steps of 6×SSC and 65° C., for 10-30 minutes per step; and
(c) a nucleic acid sequence that is substantially identical to the nucleotide sequence of (a).

14. A transgenic plant comprising a recombinant polynucleotide encoding a polypeptide having an AP2 domain, wherein the polypeptide has the property of SEQ ID NO: 12 of regulating abiotic stress tolerance in a plant when the polypeptide is overexpressed, wherein:
the AP2 domain is sufficiently homologous to the AP2 domain of SEQ ID NO: 12 that the polypeptide binds to a transcription-regulating region of DNA.

15. The transgenic plant of claim 14, wherein the recombinant polynucleotide has a nucleotide sequence that hybridizes to SEQ ID NO: 11 or to the complement of SEQ ID NO 11 under stringent conditions that include two wash steps of 6×SSC and 65° C. of 10-30 minutes per step.

16. The transgenic plant of claim 14, wherein the recombinant polynucleotide has a nucleotide sequence that hybridizes to the complement of nucleotide bases 53-256 of SEQ ID NO 11 under stringent conditions that include two wash steps of 6×SSC and 65° C. of 10-30 minutes per step.

17. The transgenic plant of claim 14, wherein the recombinant polynucleotide comprises SEQ ID NO: 11.

18. The transgenic plant of claim 14, wherein the polypeptide comprises SEQ ID NO: 12.

19. The transgenic plant of claim 14, wherein the transgenic plant is selected from the group consisting of: soybean, wheat, corn, potato, cotton, rice, oilseed rape, sunflower, alfalfa, clover, sugarcane, turf, banana, blackberry, blueberry, strawberry, raspberry, cantaloupe, carrot, cauliflower, coffee, cucumber, eggplant, grapes, honeydew, lettuce, mango, melon, onion, papaya, peas, peppers, pineapple, pumpkin, spinach, squash, sweet corn, tobacco, tomato, watermelon, mint and other labiates, citrus, fruit trees, rosaceous fruits, and brassicas.

20. The transgenic plant of claim 14, wherein the recombinant polynucleotide comprises a constitutive, inducible, or tissue-specific promoter that is operably linked to a region of the recombinant polynucleotide that encodes the polypeptide.

21. The transgenic plant of claim 14, wherein the polypeptide is selected from the group consisting of SEQ ID NOs: 2, 12, 88, 90, 92, 94, 96, 98, and 100.

22. Seed produced from the transgenic plant of claim 14.

23. A transgenic plant that overexpresses a recombinant polynucleotide comprising a nucleotide sequence that hybridizes to SEQ ID NO: 11 or the complement of SEQ ID NO 11 under stringent conditions including two wash steps of 6×SSC and 65° C. for 10-30 minutes per step;
wherein said transgenic plant has increased abiotic stress tolerance as compared to a non-transformed plant that does not overexpress a polypeptide encoded by the recombinant polynucleotide.

24. The transgenic plant of claim 23, wherein said abiotic stress tolerance is selected from the group consisting of tolerance to drought, tolerance to chilling, germination in cold conditions, and tolerance to low nitrogen.

25. A method for producing a transgenic plant having increased tolerance to abiotic stress, the method steps comprising:
(a) providing an expression vector comprising a nucleotide sequence that hybridizes to the complement of SEQ ID NO 11 under stringent conditions that include two wash steps of 6×SSC and 65° C., each step being 10-30 minutes in duration;
(b) introducing the expression vector into a plant cell;
(c) growing the plant cell into a plant, and allowing the plant to overexpress a polypeptide encoded by the nucleotide sequence, said polypeptide having the property of increasing abiotic stress tolerance in the transgenic plant as compared to a non-transformed plant that does not overexpress the polypeptide;
(d) identifying an abiotic stress tolerant plant so produced with increased abiotic stress tolerance by comparing the transgenic plant with one or more non-transformed plants that do not overexpress the polypeptide; and
(e) selecting said abiotic stress tolerant plant with increased abiotic stress tolerance.

26. The method of claim 25, the method steps further comprising:
(e) selfing or crossing said abiotic stress tolerant plant with itself or another plant, respectively, to produce seed; and
(f) growing a progeny plant from the seed, wherein said progeny plant has increased tolerance to the abiotic stress.

27. The method of claim 26, wherein:
said progeny plant expresses mRNA that encodes a DNA-binding protein having an AP2 domain that binds to a DNA molecule, regulates expression of said DNA molecule, which induces the overexpression of the polypeptide; and
said mRNA is expressed in the progeny plant at a level greater than a non-transformed plant
that does not overexpress said DNA-binding protein.

28. The method of claim 25, wherein the abiotic stress tolerance is selected from the group consisting of tolerance to drought, tolerance to chilling, germination in cold conditions, and tolerance to low nitrogen.

29. The method of claim 25, wherein the transgenic plant is produced from a plant selected from the group consisting of: soybean, wheat, corn, potato, cotton, rice, oilseed rape, sunflower, alfalfa, clover, sugarcane, turf, banana, blackberry, blueberry, strawberry, raspberry, cantaloupe, carrot, cauliflower, coffee, cucumber, eggplant, grapes, honeydew, lettuce, mango, melon, onion, papaya, peas, peppers, pineapple, pumpkin, spinach, squash, sweet corn, tobacco, tomato, watermelon, mint and other labiates, citrus, fruit trees, rosaceous fruits, and brassicas.

30. A method for increasing a plant's tolerance to abiotic stress, said method comprising:
(a) providing a vector comprising:
(i) a polynucleotide sequence, wherein the polynucleotide sequence encodes a polypeptide having an AP2 domain, and the polypeptide has the property of SEQ ID NO:12 of regulating abiotic stress tolerance in a plant; and
(ii) regulatory elements flanking the polynucleotide sequence, said regulatory elements being effective to control expression of said polynucleotide sequence; and
(b) transforming a target plant with said vector to generate a transformed plant with increased tolerance to abiotic stress as compared to a control plant that does not overexpress the polypeptide.

31. The method of claim 30, wherein the polynucleotide comprises a nucleotide sequence that hybridizes to SEQ ID NO: 11 or the complement of SEQ ID NO: 11 under stringent conditions of two wash steps of 6×SSC and 65° C. per step.

32. The method of claim 30, wherein said polynucleotide comprises SEQ ID NO: 11; or a nucleotide sequence that encodes SEQ ID NO: 12.

33. The method of claim 30, wherein said abiotic stress tolerance is selected from the group consisting of tolerance to drought, tolerance to chilling, germination in cold conditions, and tolerance to low nitrogen.

34. A method for increasing a plant's tolerance to drought stress, the method comprising:
(a) providing a vector comprising:
(i) a polynucleotide sequence, wherein the polynucleotide sequence encodes SEQ ID NO 12; and
(ii) regulatory elements flanking the polynucleotide sequence, said regulatory elements being effective to control expression of said polynucleotide sequence; and
(b) transforming a target plant with the vector to generate a transformed plant with increased tolerance to drought stress as compared to a control plant that does not overexpress SEQ ID NO 12.
